(19) United States
(12) Patent Application Publication
(10) Pub. No.: US 2015/0259698 A1
(43) Pub. Date: Sep. 17, 2015

(54) PLANTS HAVING ENHANCED YIELD-RELATED TRAITS AND A METHOD FOR MAKING THE SAME

(71) Applicant: BASF Plant Science GmbH, Ludwigshafen (DE)

(72) Inventors: Yves Hatzfeld, Lille (FR); Ana Isabel Sanz Molinero, Madrid (ES); Amber Shirley, Durham, NC (US); Lalitree Darnielle, Durham, NC (US); Valerie Frankard, Waterloo (BE); Steven Vandenabeele, Oudenaarde (BE); Bryan McKersie, Raleigh, NC (US)

(21) Appl. No.: 14/728,374

(22) Filed: Jun. 2, 2015

Related U.S. Application Data
(63) Continuation of application No. 12/598,055, filed on Oct. 29, 2009, now abandoned.
(60) Provisional application No. 60/916,575, filed on May 8, 2007.
(60) Provisional application No. 60/942,241, filed on Jun. 6, 2007.
(60) Provisional application No. 60/937,989, filed on Jun. 29, 2007.
(60) Provisional application No. 60/948,036, filed on Jul. 5, 2007.

(30) Foreign Application Priority Data
May 3, 2007 (EP) 07107448.8
May 29, 2007 (EP) 07109052.6
May 29, 2007 (EP) 07109068.2
Jun. 11, 2007 (EP) 07109961.8
Jun. 19, 2007 (EP) 07110548.0
Jun. 19, 2007 (EP) 07110557.1

(51) Int. Cl. C12N 15/82; C12N 9/12; C12N 9/02

(52) U.S. Cl. CPC C12N 15/8261; C12N 15/8216; C12N 9/0071; C12N 9/12; C12N 15/827; C12N 15/8273; C12Y 114/11; C12Y 207/11001

(57) ABSTRACT

The present invention provides a method for enhancing yield-related traits and/or improving various plant growth characteristics by modulating expression in a plant of a nucleic acid encoding a GRP (Growth Regulating Protein). The GRP is selected from a LOB-domain comprising protein (LOB: Lateral Organ Boundaries), herein abbreviated as LBD polypeptide, a JMJC (JUMONJI-C) polypeptide, a CKI (Casein Kinase I) polypeptide, a bHLH11-like (basic Helix-Loop-Helix 11) protein, a plant homeodomain finger-homeodomain (PHDf-HD) polypeptide, an ASR (abscisic acid-, stress-, and ripening-induced) polypeptide and/or a Squamosa promoter binding protein-like 11 (SPL11) transcription factor polypeptide. The present invention also concerns plants having modulated expression of a nucleic acid encoding a GRP, which plants have improved growth characteristics relative to corresponding wild type plants or other control plants. The invention also provides novel GRP nucleic acids and GRP polypeptides as well as constructs useful in the methods of the invention.

### RELATED APPLICATIONS

[0001] This application is a continuation of patent application Ser. No. 12/598,055 filed Oct. 29, 2009, which is a national stage application (under 35 U.S.C. §371) of PCT/US2008/005732, filed May 2, 2008, which claims benefit of European application 07107448.8, filed May 3, 2007; U.S. Provisional Application 60/916,575 filed on May 8, 2007; European Application 07109052.6 filed on May 29, 2007; European Application 07109068.2 filed on May 29, 2007; U.S. Provisional Application 60/942,241 filed on Jun. 6, 2007; European Application 07109961.8 filed on Jun. 11, 2007; European Application 07110548.0 filed on Jun. 19, 2007; European Application 07110557.1 filed on Jun. 19, 2007; U.S. Provisional Application 60/937,989 filed on Jun. 29, 2007 and U.S. Provisional Application 60/948,036 filed on Jul. 5, 2007. The entire content of each aforementioned application is hereby incorporated by reference in its entirety.

### SUBMISSION OF SEQUENCE LISTING

[0002] The Sequence Listing associated with this application is filed in electronic format via EFS-Web and hereby incorporated by reference into the specification in its entirety. The name of the text file containing the Sequence Listing is Sequence_Listing_{—}074053_{—}0025_{—}01. The size of the text file is 1,399 KB, and the text file was created on Jun. 2, 2015.

[0003] The present invention relates generally to the field of molecular biology and concerns a method for enhancing yield-related traits and/or improving various plant growth characteristics by modulating expression in a plant of a nucleic acid encoding a GRP (Growth Regulating Protein). The GRP is selected from a LOB-domain comprising protein (LOB: Lateral Organ Boundaries), herein abbreviated as LBD polypeptide, a JMJC (JUMONJI-C) polypeptide, a CKI (Casein Kinase I) polypeptide, a bHLH11-like (basic Helix-Loop-Helix 11) protein, a plant homeodomain finger-homeodomain (PHDf-HD) polypeptide, an ASR (abscisic acid-, stress-, and ripening-induced) polypeptide and/or a Squamosa promoter binding protein-like 11 (SPL11) transcription factor polypeptide. The present invention also concerns plants having modulated expression of a nucleic acid encoding a GRP, which plants have improved growth characteristics relative to corresponding wild type plants or other control plants. The invention also provides novel GRP nucleic acids and GRP polypeptides as well as constructs useful in the methods of the invention.

[0004] The ever-increasing world population and the dwindling supply of arable land available for agriculture fuels research towards increasing the efficiency of agriculture. Conventional means for crop and horticultural improvements utilise selective breeding techniques to identify plants having desirable characteristics. However, such selective breeding techniques have several drawbacks, namely that these techniques are typically labour intensive and result in plants that often contain heterogeneous genetic components that may not always result in the desirable trait being passed on from parent plants. Advances in molecular biology have allowed mankind to modify the germplasm of animals and plants. Genetic engineering of plants entails the isolation and manipulation of genetic material (typically in the form of DNA or RNA) and the subsequent introduction of that genetic material into a plant. Such technology has the capacity to deliver crops or plants having various improved economic, agronomic or horticultural traits.

[0005] A trait of particular economic interest is increased yield. Yield is normally defined as the measurable produce of economic value from a crop. This may be defined in terms of quantity and/or quality. Yield is directly dependent on several factors, for example, the number and size of the organs, plant architecture (for example, the number of branches), seed production, leaf senescence and more. Root development, nutrient uptake, stress tolerance and early vigour may also be important factors in determining yield. Optimizing the abovementioned factors may therefore contribute to increasing crop yield.

[0006] Seed yield is a particularly important trait, since the seeds of many plants are important for human and animal nutrition. Crops such as corn, rice, wheat, canola and soybean account for over half the total human caloric intake, whether through direct consumption of the seeds themselves or through consumption of meat products raised on processed seeds. They are also a source of sugars, oils and many kinds of metabolites used in industrial processes. Seeds contain an embryo (the source of new shoots and roots) and an endosperm (the source of nutrients for embryo growth during germination and during early growth of seedlings). The development of a seed involves many genes, and requires the transfer of metabolites from the roots, leaves and stems into the growing seed. The endosperm, in particular, assimilates the metabolic precursors of carbohydrates, oils and proteins and synthesizes them into storage macromolecules to fill out the grain.

[0007] Another important trait for many crops is early vigour. Improving early vigour is an important objective of modern rice breeding programs in both temperate and tropical rice cultivars. Long roots are important for proper soil anchorage in water-seeded rice. Where rice is sown directly into flooded fields, and where plants must emerge rapidly through water, longer shoots are associated with vigour. Where drill-seeding is practiced, longer mesocotyls and coleoptiles are important for good seedling emergence. The ability to engineer early vigour into plants would be of great importance in agriculture. For example, poor early vigor has been a limitation to the introduction of maize (Zea mays L.) hybrids based on Corn Belt germplasm in the European Atlantic.

[0008] A further important trait is that of improved abiotic stress tolerance. Abiotic stress is a primary cause of crop loss worldwide, reducing average yields for most major crop plants by more than 50% (Wang et al., Planta (2003) 218: 1-14). Abiotic stresses may be caused by drought, salinity, extremes of temperature, chemical toxicity and oxidative stress. The ability to improve plant tolerance to abiotic stress would be of great economic advantage to farmers worldwide and would allow for the cultivation of crops during adverse conditions and in territories where cultivation of crops may not otherwise be possible.

[0009] Crop yield may therefore be increased by optimising one of the above-mentioned factors.

[0010] Depending on the end use, the modification of certain yield traits may be favoured over others. For example for applications such as forage or wood production, or bio-fuel resource, an increase in the vegetative parts of a plant may be desirable, and for applications such as flour, starch or oil production, an increase in seed parameters may be particularly desirable. Even amongst the seed parameters, some may be favoured over others, depending on the application. Various mechanisms may contribute to increasing seed yield, whether that is in the form of increased seed size or increased seed number.

[0011] One approach to increasing yield (seed yield and/or biomass) in plants may be through modification of the inherent growth mechanisms of a plant, such as the cell cycle or various signalling pathways involved in plant growth or in defense mechanisms.

[0012] Surprisingly, it has now been found that modulating expression of a nucleic acid encoding a GRP polypeptide selected from a LOB-domain comprising protein (LOB: Lateral Organ Boundaries), herein abbreviated as LBD polypeptide, a JMJC (JUMONJI-C) polypeptide, a casein kinase polypeptide, a plant homeodomain finger-homeodomain (PHDf-HD) polypeptide, a bHLH11-like (basic Helix-Loop-Helix 11) protein, an ASR (abscisic acid-, stress-, and ripening-induced) polypeptide and/or a Squamosa promoter binding protein-like 11 (SPL11) transcription factor polypeptide gives plants having enhanced yield-related traits and/or improved various plant growth characteristics relative to control plants.

[0013] According one embodiment, there is provided a method for improving or enhancing yield related traits and/or improving various plant growth characteristics of a plant relative to control plants, comprising modulating expression of a nucleic acid encoding a GRP polypeptide selected from a LOB-domain comprising protein (LOB: Lateral Organ Boundaries), herein abbreviated as LBD polypeptide, a JMJC (JUMONJI-C) polypeptide, a casein kinase polypeptide, a plant homeodomain finger-homeodomain (PHDf-HD) polypeptide, a bHLH11-like (basic Helix-Loop-Helix 11) protein, an ASR (abscisic acid-, stress-, and ripening-induced) polypeptide and/or a Squamosa promoter binding protein-like 11 (SPL11) transcription factor polypeptide in a plant.

### BACKGROUND

### I. LOB-Domain Comprising Protein (LOB: Lateral Organ Boundaries)

[0014] LBD proteins (or LOB domain proteins) all share a conserved domain in the N-terminal region, known as the LOB domain. LOB domain proteins (Shuai et al., Plant Physiol. 129, 747-761, 2002) are found in various plant species and constitute a large gene family: Arabidopsis is reported to possess more than 40 genes encoding LOB domain proteins, at least 35 genes are found in rice and at least 15 genes in maize. LBD polypeptides may be regulators of transcription factors (among which KNOX transcription factors) and are postulated to play a role in tassel and ear branching in maize (Bortiri et al., Plant Cell 18, 574-587, 2006), formation of adventitious roots (Liu et al., Plant J. 43, 47-56, 2005; Inukai et al., Plant Cell 17, 1387-1396, 2005), proliferation of the female gametophyte (Evans et al., Plant Cell 19, 46-62, 2007), proximal-distal patterning in petals (Chalfun-Junior et al., Plant Mol. Biol. 57, 559-575, 2005); leaf morphology and venation (Iwakawa et al., Plant Cell Physiol. 43, 467-478, 2002). Yang et al. (Molecular Phylogenetics and Evolution 39, 248-262, 2006) discriminated three classes of LBD proteins in rice, based on the classification of Iwakawa et al. (2005) and Shuai et al. (2002). Modulation of class I LOB gene expression (up or downregulation of expression) often results in pleiotropic effects, leading to abnormal plant shape and infertility. For example, US20060218674 discloses a method for increasing the size of the endosperm in a plant seed by expressing a class I LOB polypeptide, however the size of the embryo decreased proportionally.

[0015] Surprisingly, it has now been found that modulating expression of a nucleic acid encoding a LBD polypeptide gives plants having enhanced yield-related traits, in particular increased biomass and seed yield, relative to control plants.

[0016] According one embodiment, there is provided a method for improving yield related traits of a plant relative to control plants, comprising modulating expression of a nucleic acid encoding a LBD polypeptide in a plant. The improved yield related traits comprised increased biomass and increased seed yield.

### II. JMJC (JUMONJI-C) Polypeptide

[0017] The first reported JUMONJI (which means cruciform in Japanese) gene was identified by gene trapping in mice where it plays an essential role in the development of multiple tissues. To date JUMONJI polypeptides constitute a distinct class of proteins found in prokaryotes as well as in eukaryotes including bacteria, fungi and plants.

[0018] Most members of the JUMONJI polypeptide family are characterized by the presence of a JmjC or JUMONJI-C domain. It is hypothesized that during evolution ancient proteins comprising only on JmjC domain acquired additional domains broadening the spectrum of JMJC polypeptides found in nature. Of particular interest are those JMJC polypeptides that have acquired conserved domains involved in DNA, RNA, and protein binding such as zinc fingers, FY-rich, RING finger protein and F-box domains, suggesting that polypeptides of the JUMONJI family may regulate transcription, chromatin function and/or protein turnover. Accordingly many JUMONJI proteins in animals have been reported to affect development by controlling gene expression and chromatin activity. For example a mouse JUMONJI gene acts to repress cyclin D1 in embryos and this activity is required for normal cardiogenesis (Toyoda et al. 2003 Dev Cell. 5(1):85-97.).

[0019] Much progress has been made on the understanding of the mode of action of jmjC domain containing proteins. Crucial to their biological function may be some of the recently revealed enzymatic activities in JMJC polypeptides, for example JHDM1, a JMJC polypeptide of human origin (Tsukada, Nature. 2006; 439(7078):811-6) has histone dimethylase activity, and asparaginyl hydroxylase activity has been reported in FIH (Factor Inhibiting HIF-1alpha), a transcription factor involved in cellular response to hypoxia, (Linke et al. (2004) J. Biol. Chem., Vol. 279, 14391-14397).

[0020] JmjC domains typically have structures resembling those found in some metalloenzymes. Recent structural analysis of the JmjC domain present in the JUMONJI protein FIH revealed the amino acid residues involved in binding to the cofactors 2-oxoglutarate and iron Fe (II) (Dann et al; Proc Natl Acad Sci USA. 2002; 99(24): 15351-15356). FIH has the HXD/E iron-binding motif characteristic of most of the 2-oxoglutarate oxygenases. In addition and consistent with the hydrolase activity, FIH secondary structure is composed of a beta-strand jellyroll core that surrounds the Fe(II)-binding site. These features are conserved amongst JmjC domain containing proteins (Trewick et al. EMBO Rep. 2005 (4):315-20).

[0021] In plants, two JMJC polypeptides are reportedly involved in the control of flowering time. They both act as repressors of flowering pathways in Arabidopsis thaliana (Noh et al. Plant Cell. 2004. 16(10):2601-13). Enzymatic activity for the plant proteins has not yet been experimentally determined.

[0022] Surprisingly, it has now been found that modulating expression in a plant of a nucleic acid encoding a JUMONJI-C or JMJC polypeptide gives plants having enhanced yield-related traits, in particular increased yield relative to control plants.

[0023] According to one embodiment, there is provided a method for improving yield-related traits of a plant relative to control plants, comprising modulating expression of a nucleic acid encoding a JMJC polypeptide in a plant. The improved yield related traits comprise one or more of increased total seed weight per plant, thousand-kernel (1000-seed) weight, seed filling rate, harvest index, early vigour, and root/shoot index, both under optimal growth conditions and suboptimal, mild drought conditions.

### III. Casein Kinase I

[0024] Protein kinases represent a superfamily, and the members of this superfamily catalyze the reversible transfer of a phosphate group of ATP to serine, threonine, and tyrosine amino acid side chains on target polypeptides. In particular, the Casein kinase 1 (CKI) family (EC 2.7.11.1) of protein kinases function as regulators of signal transduction pathways in most eukaryotic organisms. In yeast CK I is involved in the regulation of DNA repair and cell cycle progression (Hoekstra M F et al., Science 253: Brockman J L et al., Proc. Natl Acad Sci. USA 89: 9454-9458, 1992; Dhillon N and Hoekstra M F, EMBO J 13: 2777-2788, 1994). Casein kinase I proteins are monomeric serine/threonine type protein kinases that contain a highly conserved central kinase domain. Members of this family have divergent N-terminal and C-terminal extensions. The N-terminal region is responsible for substrate recognition and the C-terminal extension is important for the interaction of the kinase with substrates. The C-terminal extension also is thought to be important for mediating regulation through auto-phosphorylation (Gross and Anderson, 1 998 Cell Signal 10:699-71 1; Craves and Roach, 1 995, J Biol Chem 270:21689-21694).

[0025] In plants several CKI protein family members have been cloned and characterised biochemically (Klimczak and Cashmore A R, 1993. Biochem. J. 293: 283-288; Liu et al. 2003, Plant Journal. 36, 189-202; Lee et al. 2005 Plant Cell. 17(10): 2817-2831. The Arabidopsis genome was found to contain at least 14 Casein Kinase I-like (CKL) genes. Within the conserved kinase domains, the polypeptides shared 89% sequence similarity at the amino acid level. The 14 Arabidopsis CKL isoforms have been further classified in three groups based on the subcellular localization. Group 1 localized predominantly at the cell periphery; group 2 in the nucleus group 3 in the cytoplasm. A Nicotiana tabacum CKI has been localized to plasmodesmata and propose to play a role in cell to cell communication (Lee et al. 2005). Other proposed roles for plant CKI is signal truduction in response to environmental stimuli, root development and plant hormone sensitivity (Liu et al.).

[0026] Surprisingly, it has now been found that modulating expression of a nucleic acid encoding a CKI polypeptide gives plants having enhanced yield-related traits relative to control plants.

[0027] According to one embodiment, there is provided a method for improving yield related traits of a plant relative to control plants, comprising modulating expression of a nucleic acid encoding a CKI polypeptide in a plant. The improved yield related traits comprised one or more of increased biomass, increased emergency vigour, and increased seed yield.

### IV. Plant Homeodomain Finger-Homeodomain (PHDf-HD) Polypeptide

[0028] Transcription factors are usually defined as proteins that show sequence-specific DNA binding affinity and that are capable of activating and/or repressing transcription. The Arabidopsis thaliana genome codes for at least 1533 transcriptional regulators, accounting for ˜5.9% of its estimated total number of genes (Riechmann et al. (2000) Science 290: 2105-2109). The Database of Rice Transcription Factors (DRTF) is a collection of known and predicted transcription factors of Oryza sativa L. ssp. indica and Oryza sativa L. ssp. japonica, and currently contains 2,025 putative transcription factors (TF) gene models in indica and 2,384 in japonica, distributed in 63 families (Gao et al. (2006) Bioinformatics 2006, 22(10):1286-7).

[0029] One of these families is the superfamily of homeodomain (HD) transcription factors involved in many aspects of developmental processes. HD transcription factors are characterized by the presence of a homeodomain (HD), which is a 60-amino acid DNA-binding domain (BD). Arabidopsis thaliana and rice contain approximately 100 HD transcription factors, which can be further classified into subfamilies based on amino acid sequence identity (Richardt et al. (2007) Plant Phys 143(4): 1452-1466). Some of these subfamilies are characterized by the presence of additional conserved domains that facilitate DNA binding and/or protein-protein interactions.

[0030] One of these domains is the PHD finger, named plant homeodomain finger (PHDf) due to its association on a same polypeptide with a DNA-binding HD, that was originally identified by amino acid sequence identity between a maize homeobox transcription factor ZmHOX1a (Bellman & Werr (1992) EMBO J 11:3367-3374) and its Arabidopsis relative ATHAT3.1 (Schindler et al. (1993) Plant J 4: 137-150). The PHDf is a Cys₄-His-Cys₃ zinc-finger-like motif capable of chelating two zinc ions. PHDfs are found in nuclear proteins and are thought to be involved in chromatin-mediated transcriptional regulation (Halbach et al. (2000) Nucleic Acid Res 28(18): 3542-3550).

[0031] Transcriptional factors combining a PHDf and a HD are therefore named PHDf-HDs (Halbach et al. (2000) supra). In plants, such PHDf-HDs are further characterized by the presence of a leucine zipper (ZIP) upstream of the PHDf. Both domains (the ZIP and the PHDf) together form a highly conserved 180 amino acid region called the ZIP/PHDf domain (Halbach et al. (2000) supra).

[0032] Transgenic tobacco plants strongly overexpressing either of two maize PHDf-HD polypeptides (ZmHOX1a or ZmHOX1b) using a cauliflower mosaic virus 35S promoter combined with an omega enhancer, showed identical morphological changes: size reduction, adventitious root formation, and homeotic floral transformations (Uberlacker et al. (1996) Plant Cell 8: 349-362). Transgenic rice and tobacco plants strongly overexpressing Oryza sativa HAZ1 PHDF-HD polypeptide using cauliflower mosaic virus 35S promoter showed no abnormal growth or phenotypic change compared to wild types (Ito et al. (2004) Gene 331: 9-15).

[0033] In U.S. Pat. No. 7,196,245, an Arabidopsis thaliana PHDf-HD polypeptide (identified as G416) was transformed into Arabidopsis, and shown to promote early flowering in the transgenic plants compared to control plants, with no impact on seed yield.

[0034] Surprisingly, it has now been found that modulating, preferably increasing, expression of a nucleic acid sequence encoding a PHDf-HD polypeptide gives plants having enhanced yield-related traits, preferably enhanced seed yield-related traits, relative to control plants.

[0035] According one embodiment, there is provided a method for enhancing yield-related traits, preferably enhancing seed yield-related traits, in plants relative to control plants, comprising modulating, preferably increasing, expression of a nucleic acid sequence encoding a PHDf-HD polypeptide in a plant. The enhanced yield-related traits, preferably enhanced seed yield-related traits, comprise one or more of: increased number of primary panicles, increased total seed yield per plant, increased number of (filled) seeds, increased thousand kernel weight (TKW), increased harvest index.

V. bHLH11-Like (Basic Helix-Loop-Helix 11) Protein

[0036] Transcription factors are usually defined as proteins that show sequence-specific DNA binding and that are capable of activating and/or repressing transcription. The basic Helix-Loop-Helix transcription factor family is one of the largest families of transcription factors that have been characterised in Arabidopsis thaliana (Toledo-Ortiz et al., Plant Cell 15, 1749-1770, 2003; Bailey et al., Plant Cell 15, 2497-2501, 2003) and in rice (Li et al Plant Physiol. 141, 1167-1184, 2006). The distinguishing characteristic of the bHLH transcription factor family is the presence of a bipartite domain consisting of approximately 60 amino acids. This bipartite domain is comprised of a DNA-binding basic region, which binds to a consensus hexanucleotide E-box and two α-helices separated by a variable loop region, located C-terminally of the basic domain. The two α-helices promote dimerisation, allowing the formation of homo- and heterodimers between different family members. While the bHLH domain is evolutionarily conserved, there is little sequence similarity between clades beyond the domain. Li et al. (2006) classify the rice and Arabidopsis bHLH transcription factors into 22 subfamilies, based on the sequence of the bHLH domains.

[0037] Little is known about the function of bHLH11-like polypeptides in plants. So far, only one bHLH11-like polypeptide, OsPTF1 from rice, has been characterised. OsPTF1 is reported to be involved in tolerance to phosphate starvation (Yi et al., Plant Physiol. 138, 2087-2096). Rice plants overexpressing this gene under control of the 35S promoter did not show any different phenotype compared to control plants when grown under normal conditions, but under conditions of phosphate limitation, the plants had an improved phosphate uptake. Under phosphate limitation, the transgenic plants showed an increase in biomass, phosphate content, increased tillering and increased seed yield.

[0038] Surprisingly, it has now been found that modulating expression I a plant of a nucleic acid encoding a bHLH11-like polypeptide gives plants having enhanced yield-related traits, in particular increased yield relative to control plants. These effects were shown under growth conditions where phosphate was not limiting.

[0039] According one embodiment, there is provided a method for improving yield related traits of a plant relative to control plants, comprising modulating expression of a nucleic acid encoding a bHLH11-like polypeptide in a plant. The improved yield related traits comprised increased seed yield.

### VI. ASR (Abscisic Acid-, Stress-, and Ripening-Induced) Protein

[0040] ASR (abscisic acid-, stress-, and ripening-induced) polypeptides were first identified in tomato (Iusem et al 1993 Plant Physiol 102: 1353-1354) as small highly charged hydrophyllic proteins localized to the nuclei of the cells and bound to chromatin. The Asr gene family encoding ASR polypeptides is found widespread in higher plants and ASR homologs have cloned from a large number of dicot and monocot plants (Carrai et al. 2004 Trends Plant Sci 9: 57-59). Most Asr genes are up-regulated under different environmental stress conditions, during fruit ripening, and upon cellular treatment with the hormone ABA. ASR polypeptides show a high a degree of sequence conservation (Frankel et al. 2006. Gene Pages 74-83). All known Asr genes contain two highly conserved regions. The first region contains a stretch of His residues at the N-terminus, possessing sequence-specific Zn²⁺-dependent DNA binding activity (Kalifa et al., 2004a Biochem J 381: 373-378). The second region is a large part of the C-terminal sequence, often containing a nuclear localization signal NLS (Cakir et al., 2003 Plant Cell 15: 2165-2180). ASR1 protein of tomato is an intrinsically unstructured protein which upon binding of zinc ions, becomes ordered (folded) and forms dimers (Goldgur et al. Plant Physiol. 2007 February; 143(2):617-28)

[0041] A putative role of ASR polypeptides in regulation of gene transcription has been suggested. Reportedly, yeast-one-hybrid experiments revealed that a grape ASR binds to the promoter of a hexose transporter gene (VvHT1). Consistently, a role of Asr1 in the control of hexose uptake in heterotrophic organs such as potato tubers has been suggested (Frankel et al. Plant Mol Biol. 2007 March; 63(5):719-30). Zinc-dependent DNA binding activity of a protein member of the ASR family has been reported (Kalifa et al. 2004 Biochem J. 2004 Jul. 15; 381(Pt 2):373-8). DNA- and zinc-binding domains of ASR1 protein have been mapped (Rom et al. 2006. Biochimie. 88(6):621-8; Goldgur et al. 2007. Plant Physiol. February; 143(2):617-28).

[0042] The use of ASR polypeptides to improve agronomic traits in plants has been disclosed, as methods to enhance tolerance of plant to particular abiotic stresses. For example, overexpression in Arabidopsis (Arabidopsis thaliana) of the ASR1 ortholog LLA23 gene from lily (Lilium longiflorum) increases the plant tolerance to drought and salinity (Yang et al. 2005. Plant Physiol 139: 836-846). Further, U.S. Pat. No. 7,154,025 discloses methods for increasing resistance to water deficit stress by increasing amount of ASR proteins in a plant.

[0043] Surprisingly, it has now been found that modulating expression in a plant of a nucleic acid encoding an ASR polypeptide gives plants having enhanced yield-related traits under non-stress growth conditions, relative to control plants. According to a first embodiment, the present invention provides a method for enhancing yield-related traits under non-stress growth conditions in plants relative to control plants, comprising modulating expression in a plant of a nucleic acid encoding an ASR polypeptide.

### VII. Squamosa Promoter Binding Protein-Like 11 (SPL11)

[0044] Transcription factor polypeptides are usually defined as proteins that show sequence-specific DNA binding affinity and that are capable of activating and/or repressing transcription. The Squamosa promoter binding protein-like (SPL) transcription factor polypeptides are structurally diverse proteins that share a highly conserved DNA binding domain (DBD) of about 80 amino acid residues in length (Klein et al. (1996) Mol Gen Genet 259: 7-16; Cardon et al. (1999) Gene 237: 91-104). The SPL transcription factor DNA consensus sequence binding site in the promoter of target genes is 5′-TNCGTACAA-3′ where N represents any base. Within the SPL DBD are ten conserved cysteine (Cys) or histidine (His) residues (see FIG. 28) of which eight are zinc coordinating residues binding two zinc ions necessary for the formation of SPL specific zinc finger tertiary structure (Yamasaki et al. (2004) J Mol Biol 337: 49-63). A second conserved feature within the SPL DBD is a bipartite nuclear localisation signal. Outside of the DBD, a micro RNA (miRNA) target motif, specifically targeted by miR156 family of miRNAs is found in most of the nucleic acid sequences encoding SPL transcription factor polypeptides (either in the coding region, or the 3′ UTR) across the plant kingdom (Rhoades et al. (2002) Cell 110: 513-520). miRNAs control SPL gene expression post-transcriptionally by targeting SPL encoding mRNAs for degradation or by translational repression.

[0045] The Arabidopsis genome codes for at least 1533 transcriptional regulators, accounting for ˜5.9% of its estimated total number of genes (Riechmann et al. (2000) Science 290: 2105-2109). The authors report 16 SPL transcription factor polypeptides in Arabidopsis thaliana, with little sequence similarity among themselves (apart from the abovementioned features), the size of the deduced SPL polypeptide ranging from 131 to 927 amino acids. Nevertheless, pairs of SPL transcription factor polypeptides sharing higher sequence homology were detected within the SPL family of this plant (Cardon et al. (1999)).

[0046] The SPL transcription factor polypeptides (only found in plants) characterized to date have been shown to function in plant development, in particular in flower development. Transgenic plants overexpressing an SPL3 transcription factor polypeptide were reported to flower earlier (Cardon et al. (1997) Plant J 12: 367-377). In European patent application EP1033405, the nucleic acid and deduced polypeptide sequences of the SPL11 transcription factor polypeptide are disclosed.

[0047] Surprisingly, it has now been found that modulating expression I a plant of a nucleic acid encoding a SPL11 polypeptide gives plants having enhanced yield-related traits, in particular increased yield relative to control plants.

[0048] According to one embodiment, there is provided a method for enhancing yield related traits of a plant relative to control plants, comprising modulating expression of a nucleic acid encoding a SPL11 polypeptide in a plant. The enhanced yield related traits comprise one or more of increased emergence vigour (improved seedling early vigour), total seed yield (seed weight), seed fill rate (seed filling rate), number of filled seeds, number of flowers (seeds) per panicle, harvest index and thousand-kernel (1000-seed) weight, such increase occurring both under optimal and suboptimal growth conditions, preferably mild drought conditions.

[0049] According to one embodiment, there is provided novel SPL11 nucleic acids and SPL11 polypeptides as well as constructs comprising SPL11-encoding nucleic acids, useful in performing the methods of the invention

### DEFINITIONS

### Polypeptide(s)/Protein(s)

[0050] The terms “polypeptide” and “protein” are used interchangeably herein and refer to amino acids in a polymeric form of any length, linked together by peptide bonds.

### Polynucleotide(s)/Nucleic Acid(s)/Nucleic Acid Sequence(s)/Nucleotide Sequence(s)

[0051] The terms “polynucleotide(s)”, “nucleic acid sequence(s)”, “nucleotide sequence(s)”, “nucleic acid(s)”, “nucleic acid molecule” are used interchangeably herein and refer to nucleotides, either ribonucleotides or deoxyribonucleotides or a combination of both, in a polymeric unbranched form of any length.

### Control Plant(s)

[0052] The choice of suitable control plants is a routine part of an experimental setup and may include corresponding wild type plants or corresponding plants without the gene of interest. The control plant is typically of the same plant species or even of the same variety as the plant to be assessed. The control plant may also be a nullizygote of the plant to be assessed. Nullizygotes are individuals missing the transgene by segregation. A “control plant” as used herein refers not only to whole plants, but also to plant parts, including seeds and seed parts.

### Homologue(s)

[0053] “Homologues” of a protein encompass peptides, oligopeptides, polypeptides, proteins and enzymes having amino acid substitutions, deletions and/or insertions relative to the unmodified protein in question and having similar biological and functional activity as the unmodified protein from which they are derived.

[0054] A deletion refers to removal of one or more amino acids from a protein.

[0055] An insertion refers to one or more amino acid residues being introduced into a predetermined site in a protein. Insertions may comprise N-terminal and/or C-terminal fusions as well as intra-sequence insertions of single or multiple amino acids. Generally, insertions within the amino acid sequence will be smaller than N- or C-terminal fusions, of the order of about 1 to 10 residues. Examples of N- or C-terminal fusion proteins or peptides include the binding domain or activation domain of a transcriptional activator as used in the yeast two-hybrid system, phage coat proteins, (histidine)-6-tag, glutathione S-transferase-tag, protein A, maltose-binding protein, dihydrofolate reductase, Tag100 epitope, c-myc epitope, FLAG®-epitope, lacZ, CMP (calmodulin-binding peptide), HA epitope, protein C epitope and VSV epitope.

[0056] A substitution refers to replacement of amino acids of the protein with other amino acids having similar properties (such as similar hydrophobicity, hydrophilicity, antigenicity, propensity to form or break α-helical structures or β-sheet structures). Amino acid substitutions are typically of single residues, but may be clustered depending upon functional constraints placed upon the polypeptide; insertions will usually be of the order of about 1 to 10 amino acid residues. The amino acid substitutions are preferably conservative amino acid substitutions. Conservative substitution tables are well known in the art (see for example Creighton (1984) Proteins. W.H. Freeman and Company (Eds) and Table 1 below).

TABLE 1
Examples of conserved amino acid substitutions

| | Conservative | | Conservative |
|---|---|---|---|
| Residue | Substitutions | Residue | Substitutions |
| Ala | Ser | Leu | Ile; Val |
| Arg | Lys | Lys | Arg; Gln |
| Asn | Gln; His | Met | Leu; Ile |
| Asp | Glu | Phe | Met; Leu; Tyr |
| Gln | Asn | Ser | Thr; Gly |
| Cys | Ser | Thr | Ser; Val |
| Glu | Asp | Trp | Tyr |
| Gly | Pro | Tyr | Trp; Phe |
| His | Asn; Gln | Val | Ile; Leu |
| Ile | Leu, Val | | |

[0057] Amino acid substitutions, deletions and/or insertions may readily be made using peptide synthetic techniques well known in the art, such as solid phase peptide synthesis and the like, or by recombinant DNA manipulation. Methods for the manipulation of DNA sequences to produce substitution, insertion or deletion variants of a protein are well known in the art. For example, techniques for making substitution mutations at predetermined sites in DNA are well known to those skilled in the art and include M13 mutagenesis, T7-Gen in vitro mutagenesis (USB, Cleveland, Ohio), QuickChange Site Directed mutagenesis (Stratagene, San Diego, Calif.), PCR-mediated site-directed mutagenesis or other site-directed mutagenesis protocols.

### Derivatives

[0058] “Derivatives” include peptides, oligopeptides, polypeptides which may, compared to the amino acid sequence of the naturally-occurring form of the protein, such as the protein of interest, comprise substitutions of amino acids with non-naturally occurring amino acid residues, or additions of non-naturally occurring amino acid residues. “Derivatives” of a protein also encompass peptides, oligopeptides, polypeptides which comprise naturally occurring altered (glycosylated, acylated, prenylated, phosphorylated, myristoylated, sulphated etc.) or non-naturally altered amino acid residues compared to the amino acid sequence of a naturally-occurring form of the polypeptide. A derivative may also comprise one or more non-amino acid substituents or additions compared to the amino acid sequence from which it is derived, for example a reporter molecule or other ligand, covalently or non-covalently bound to the amino acid sequence, such as a reporter molecule which is bound to facilitate its detection, and non-naturally occurring amino acid residues relative to the amino acid sequence of a naturally-occurring protein. Furthermore, “derivatives” also include fusions of the naturally-occurring form of the protein with tagging peptides such as FLAG, HIS6 or thioredoxin (for a review of tagging peptides, see Terpe, Appl. Microbiol. Biotechnol. 60, 523-533, 2003).

### Ortholoque(s)/Paralogue(s)

[0059] Orthologues and paralogues encompass evolutionary concepts used to describe the ancestral relationships of genes. Paralogues are genes within the same species that have originated through duplication of an ancestral gene; orthologues are genes from different organisms that have originated through speciation, and are also derived from a common ancestral gene.

### Domain

[0060] The term “domain” refers to a set of amino acids conserved at specific positions along an alignment of sequences of evolutionarily related proteins. While amino acids at other positions can vary between homologues, amino acids that are highly conserved at specific positions indicate amino acids that are likely essential in the structure, stability or function of a protein. Identified by their high degree of conservation in aligned sequences of a family of protein homologues, they can be used as identifiers to determine if any polypeptide in question belongs to a previously identified polypeptide family.

### Motif/Consensus Sequence/Signature

[0061] The term “motif” or “consensus sequence” or “signature” refers to a short conserved region in the sequence of evolutionarily related proteins. Motifs are frequently highly conserved parts of domains, but may also include only part of the domain, or be located outside of conserved domain (if all of the amino acids of the motif fall outside of a defined domain).

### Hybridisation

[0062] The term “hybridisation” as defined herein is a process wherein substantially homologous complementary nucleotide sequences anneal to each other. The hybridisation process can occur entirely in solution, i.e. both complementary nucleic acids are in solution. The hybridisation process can also occur with one of the complementary nucleic acids immobilised to a matrix such as magnetic beads, Sepharose beads or any other resin. The hybridisation process can furthermore occur with one of the complementary nucleic acids immobilised to a solid support such as a nitro-cellulose or nylon membrane or immobilised by e.g. photolithography to, for example, a siliceous glass support (the latter known as nucleic acid arrays or microarrays or as nucleic acid chips). In order to allow hybridisation to occur, the nucleic acid molecules are generally thermally or chemically denatured to melt a double strand into two single strands and/or to remove hairpins or other secondary structures from single stranded nucleic acids.

[0063] The term “stringency” refers to the conditions under which a hybridisation takes place. The stringency of hybridisation is influenced by conditions such as temperature, salt concentration, ionic strength and hybridisation buffer composition. Generally, low stringency conditions are selected to be about 30° C. lower than the thermal melting point (Tₘ) for the specific sequence at a defined ionic strength and pH. Medium stringency conditions are when the temperature is 20° C. below Tₘ, and high stringency conditions are when the temperature is 10° C. below Tₘ. High stringency hybridisation conditions are typically used for isolating hybridising sequences that have high sequence similarity to the target nucleic acid sequence. However, nucleic acids may deviate in sequence and still encode a substantially identical polypeptide, due to the degeneracy of the genetic code. Therefore medium stringency hybridisation conditions may sometimes be needed to identify such nucleic acid molecules.

[0064] The Tm is the temperature under defined ionic strength and pH, at which 50% of the target sequence hybridises to a perfectly matched probe. The Tₘ is dependent upon the solution conditions and the base composition and length of the probe. For example, longer sequences hybridise specifically at higher temperatures. The maximum rate of hybridisation is obtained from about 16° C. up to 32° C. below Tₘ. The presence of monovalent cations in the hybridisation solution reduce the electrostatic repulsion between the two nucleic acid strands thereby promoting hybrid formation; this effect is visible for sodium concentrations of up to 0.4M (for higher concentrations, this effect may be ignored). Formamide reduces the melting temperature of DNA-DNA and DNA-RNA duplexes with 0.6 to 0.7° C. for each percent formamide, and addition of 50% formamide allows hybridisation to be performed at 30 to 45° C., though the rate of hybridisation will be lowered. Base pair mismatches reduce the hybridisation rate and the thermal stability of the duplexes. On average and for large probes, the Tm decreases about 1° C. per % base mismatch. The Tm may be calculated using the following equations, depending on the types of hybrids:
[0065] 1) DNA-DNA hybrids (Meinkoth and Wahl, Anal. Biochem., 138: 267-284, 1984):

Tₘ=81.5° C.+16.6×log₁₀[Na⁺]^{a}+0.41x %[G/C^{b}]−500×[L^{c}]⁻¹−0.61x % formamide
[0066] 2) DNA-RNA or RNA-RNA hybrids:

Tm=79.8+18.5(log₁₀[Na⁺]^{a})+0.58(%G/C^{b})+11.8(%G/C^{b})²−820/L^{c}
[0067] 3) oligo-DNA or oligo-RNA^{d} hybrids:

[0068] For <20 nucleotides: Tₘ=2 (Iₙ)

[0069] For 20-35 nucleotides: Tₘ=22+1.46 (Iₙ)
[0070] ^{a} or for other monovalent cation, but only accurate in the 0.01-0.4 M range.
[0071] ^{b} only accurate for % GC in the 30% to 75% range.
[0072] ^{c}L=length of duplex in base pairs.
[0073] ^{d} oligo, oligonucleotide; Iₙ,=effective length of primer=2×(no. of G/C)+(no. of NT).

[0074] Non-specific binding may be controlled using any one of a number of known techniques such as, for example, blocking the membrane with protein containing solutions, additions of heterologous RNA, DNA, and SDS to the hybridisation buffer, and treatment with Rnase. For non-homologous probes, a series of hybridizations may be performed by varying one of (i) progressively lowering the annealing temperature (for example from 68° C. to 42° C.) or (ii) progressively lowering the formamide concentration (for example from 50% to 0%). The skilled artisan is aware of various parameters which may be altered during hybridisation and which will either maintain or change the stringency conditions.

[0075] Besides the hybridisation conditions, specificity of hybridisation typically also depends on the function of post-hybridisation washes. To remove background resulting from non-specific hybridisation, samples are washed with dilute salt solutions. Critical factors of such washes include the ionic strength and temperature of the final wash solution: the lower the salt concentration and the higher the wash temperature, the higher the stringency of the wash.

[0076] Wash conditions are typically performed at or below hybridisation stringency. A positive hybridisation gives a signal that is at least twice of that of the background. Generally, suitable stringent conditions for nucleic acid hybridisation assays or gene amplification detection procedures are as set forth above. More or less stringent conditions may also be selected. The skilled artisan is aware of various parameters which may be altered during washing and which will either maintain or change the stringency conditions.

[0077] For example, typical high stringency hybridisation conditions for DNA hybrids longer than 50 nucleotides encompass hybridisation at 65° C. in 1×SSC or at 42° C. in 1×SSC and 50% formamide, followed by washing at 65° C. in 0.3×SSC. Examples of medium stringency hybridisation conditions for DNA hybrids longer than 50 nucleotides encompass hybridisation at 50° C. in 4×SSC or at 40° C. in 6×SSC and 50% formamide, followed by washing at 50° C. in 2×SSC. The length of the hybrid is the anticipated length for the hybridising nucleic acid. When nucleic acids of known sequence are hybridised, the hybrid length may be determined by aligning the sequences and identifying the conserved regions described herein. 1×SSC is 0.15M NaCl and 15 mM sodium citrate; the hybridisation solution and wash solutions may additionally include 5×Denhardt's reagent, 0.5-1.0% SDS, 100 μg/ml denatured, fragmented salmon sperm DNA, 0.5% sodium pyrophosphate.

[0078] For the purposes of defining the level of stringency, reference can be made to Sambrook et al. (2001) Molecular Cloning: a laboratory manual, 3^{rd} Edition, Cold Spring Harbor Laboratory Press, CSH, New York or to Current Protocols in Molecular Biology, John Wiley & Sons, N.Y. (1989 and yearly updates).

### Splice Variant

[0079] The term “splice variant” as used herein encompasses variants of a nucleic acid sequence in which selected introns and/or exons have been excised, replaced, displaced or added, or in which introns have been shortened or lengthened. Such variants will be ones in which the biological activity of the protein is substantially retained; this may be achieved by selectively retaining functional segments of the protein. Such splice variants may be found in nature or may be manmade. Methods for predicting and isolating such splice variants are well known in the art (see for example Foissac and Schiex (2005) BMC Bioinformatics 6: 25).

### Allelic Variant

[0080] Alleles or allelic variants are alternative forms of a given gene, located at the same chromosomal position. Allelic variants encompass Single Nucleotide Polymorphisms (SNPs), as well as Small Insertion/Deletion Polymorphisms (INDELs). The size of INDELs is usually less than 100 bp. SNPs and INDELs form the largest set of sequence variants in naturally occurring polymorphic strains of most organisms.

### Gene Shuffling/Directed Evolution

[0081] Gene shuffling or directed evolution consists of iterations of DNA shuffling followed by appropriate screening and/or selection to generate variants of nucleic acids or portions thereof encoding proteins having a modified biological activity (Castle et al., (2004) Science 304(5674): 1151-4; U.S. Pat. Nos. 5,811,238 and 6,395,547).

### Regulatory Element/Control Sequence/Promoter

[0082] The terms “regulatory element”, “control sequence” and “promoter” are all used interchangeably herein and are to be taken in a broad context to refer to regulatory nucleic acid sequences capable of effecting expression of the sequences to which they are ligated. The term “promoter” typically refers to a nucleic acid control sequence located upstream from the transcriptional start of a gene and which is involved in recognising and binding of RNA polymerase and other proteins, thereby directing transcription of an operably linked nucleic acid. Encompassed by the aforementioned terms are transcriptional regulatory sequences derived from a classical eukaryotic genomic gene (including the TATA box which is required for accurate transcription initiation, with or without a CCAAT box sequence) and additional regulatory elements (i.e. upstream activating sequences, enhancers and silencers) which alter gene expression in response to developmental and/or external stimuli, or in a tissue-specific manner. Also included within the term is a transcriptional regulatory sequence of a classical prokaryotic gene, in which case it may include a −35 box sequence and/or −10 box transcriptional regulatory sequences. The term “regulatory element” also encompasses a synthetic fusion molecule or derivative that confers, activates or enhances expression of a nucleic acid molecule in a cell, tissue or organ.

[0083] A “plant promoter” comprises regulatory elements, which mediate the expression of a coding sequence segment in plant cells. Accordingly, a plant promoter need not be of plant origin, but may originate from viruses or micro-organisms, for example from viruses which attack plant cells. The “plant promoter” can also originate from a plant cell, e.g. from the plant which is transformed with the nucleic acid sequence to be expressed in the inventive process and described herein. This also applies to other “plant” regulatory signals, such as “plant” terminators. The promoters upstream of the nucleotide sequences useful in the methods of the present invention can be modified by one or more nucleotide substitution(s), insertion(s) and/or deletion(s) without interfering with the functionality or activity of either the promoters, the open reading frame (ORF) or the 3′-regulatory region such as terminators or other 3′ regulatory regions which are located away from the ORF. It is furthermore possible that the activity of the promoters is increased by modification of their sequence, or that they are replaced completely by more active promoters, even promoters from heterologous organisms. For expression in plants, the nucleic acid molecule must, as described above, be linked operably to or comprise a suitable promoter which expresses the gene at the right point in time and with the required spatial expression pattern.

[0084] For the identification of functionally equivalent promoters, the promoter strength and/or expression pattern of a candidate promoter may be analysed for example by operably linking the promoter to a reporter gene and assaying the expression level and pattern of the reporter gene in various tissues of the plant. Suitable well-known reporter genes include for example beta-glucuronidase or beta-galactosidase. The promoter activity is assayed by measuring the enzymatic activity of the beta-glucuronidase or beta-galactosidase. The promoter strength and/or expression pattern may then be compared to that of a reference promoter (such as the one used in the methods of the present invention). Alternatively, promoter strength may be assayed by quantifying mRNA levels or by comparing mRNA levels of the nucleic acid used in the methods of the present invention, with mRNA levels of housekeeping genes such as 18S rRNA, using methods known in the art, such as Northern blotting with densitometric analysis of autoradiograms, quantitative real-time PCR or RT-PCR (Heid et al., 1996 Genome Methods 6: 986-994). Generally by “weak promoter” is intended a promoter that drives expression of a coding sequence at a low level. By “low level” is intended at levels of about 1/10,000 transcripts to about 1/100,000 transcripts, to about 1/500,0000 transcripts per cell. Conversely, a “strong promoter” drives expression of a coding sequence at high level, or at about 1/10 transcripts to about 1/100 transcripts to about 1/1000 transcripts per cell. Generally, by “medium strength promoter” is intended a promoter that drives expression of a coding sequence at a lower level than a strong promoter, in particular at a level that is in all instances below that obtained when under the control of a 35S CaMV promoter.

### Operably Linked

[0085] The term “operably linked” as used herein refers to a functional linkage between the promoter sequence and the gene of interest, such that the promoter sequence is able to initiate transcription of the gene of interest.

### Constitutive Promoter

[0086] A “constitutive promoter” refers to a promoter that is transcriptionally active during most, but not necessarily all, phases of growth and development and under most environmental conditions, in at least one cell, tissue or organ. Table 2a below gives examples of constitutive promoters.

TABLE 2a
Examples of constitutive promoters

| Gene Source | Reference |
|---|---|
| Actin | McElroy et al, Plant Cell, 2: 163-171, 1990 |
| HMGP | WO 2004/070039 |
| CAMV 35S | Odell et al, Nature, 313: 810-812, 1985 |
| CaMV 19S | Nilsson et al., Physiol. Plant. 100:456-462, 1997 |
| GOS2 | de Pater et al, Plant J November; 2(6):837-44, 1992, |
| | WO 2004/065596 |
| Ubiquitin | Christensen et al, Plant Mol. Biol. 18: 675-689, |
| | 1992 |
| Rice cyclophilin | Buchholz et al, Plant Mol Biol. 25(5): 837-43, 1994 |
| Maize H3 histone | Lepetit et al, Mol. Gen. Genet. 231:276-285, 1992 |
| Alfalfa H3 histone | Wu et al. Plant Mol. Biol. 11:641-649, 1988 |
| Actin 2 | An et al, Plant J. 10(1); 107-121, 1996 |
| 34S FMV | Sanger et al., Plant. Mol. Biol., 14, 1990: 433-443 |
| Rubisco small subunit | U.S. Pat. No. 4,962,028 |
| OCS | Leisner (1988) Proc Natl Acad Sci USA. 85(5): |
| | 2553 |
| SAD1 | Jain et al., Crop Science, 39 (6), 1999: 1696 |
| SAD2 | Jain et al., Crop Science, 39 (6), 1999: 1696 |
| nos | Shaw et al. (1984) Nucleic Acids Res. |
| | 12(20):7831-7846 |
| V-ATPase | WO 01/14572 |
| Super promoter | WO 95/14098 |
| G-box proteins | WO 94/12015 |

### Ubiquitous Promoter

[0087] A ubiquitous promoter is active in substantially all tissues or cells of an organism.

### Developmentally-Regulated Promoter

[0088] A developmentally-regulated promoter is active during certain developmental stages or in parts of the plant that undergo developmental changes.

### Inducible Promoter

[0089] An inducible promoter has induced or increased transcription initiation in response to a chemical (for a review see Gatz 1997, Annu. Rev. Plant Physiol. Plant Mol. Biol., 48:89-108), environmental or physical stimulus, or may be “stress-inducible”, i.e. activated when a plant is exposed to various stress conditions, or a “pathogen-inducible” i.e. activated when a plant is exposed to exposure to various pathogens.

### Organ-Specific/Tissue-Specific Promoter

[0090] An organ-specific or tissue-specific promoter is one that is capable of preferentially initiating transcription in certain organs or tissues, such as the leaves, roots, seed tissue etc. For example, a “root-specific promoter” is a promoter that is transcriptionally active predominantly in plant roots, substantially to the exclusion of any other parts of a plant, whilst still allowing for any leaky expression in these other plant parts. Promoters able to initiate transcription in certain cells only are referred to herein as “cell-specific”.

[0091] Examples of root-specific promoters are listed in Table 2b below:

TABLE 2b
Examples of root-specific promoters

| Gene Source | Reference |
|---|---|
| RCc3 | Plant Mol Biol. January 1995; 27(2):237-48 |
| Arabidopsis PHT1 | Kovama et al., 2005; Mudge et al. (2002, Plant J. |
| | 31:341) |
| Medicago phosphate | Xiao et al., 2006 |
| transporter | |
| Arabidopsis Pyk10 | Nitz et al. (2001) Plant Sci 161(2): 337-346 |
| root-expressible genes | Tingey et al., EMBO J. 6: 1, 1987. |
| tobacco auxin-inducible | Van der Zaal et al., Plant Mol. Biol. 16, 983, |
| gene | 1991. |
| β-tubulin | Oppenheimer, et al., Gene 63: 87, 1988. |
| tobacco root-specific | Conkling, et al., Plant Physiol. 93: 1203, 1990. |
| genes | |
| B. napus G1-3b gene | U.S. Pat. No. 5, 401, 836 |
| SbPRP1 | Suzuki et al., Plant Mol. Biol. 21: 109-119, 1993. |
| LRX1 | Baumberger et al. 2001, Genes & Dev. 15:1128 |
| BTG-26 Brassica napus | U.S. 20050044585 |
| LeAMT1 (tomato) | Lauter et al. (1996, PNAS 3:8139) |
| The LeNRT1-1 (tomato) | Lauter et al. (1996, PNAS 3:8139) |
| class I patatin gene | Liu et al., Plant Mol. Biol. 153:386-395, 1991. |
| (potato) | |
| KDC1 (Daucus carota) | Downey et al. (2000, J. Biol. Chem. 275:39420) |
| TobRB7 gene | W Song (1997) PhD Thesis, North Carolina State |
| | University, Raleigh, NC USA |
| OsRAB5a (rice) | Wang et al. 2002, Plant Sci. 163:273 |
| ALF5 (Arabidopsis) | Diener et al. (2001, Plant Cell 13:1625) |
| NRT2; 1Np (N. | Quesada et al. (1997, Plant Mol. Biol. 34:265) |
| plumbaginifolia) | |

[0092] A seed-specific promoter is transcriptionally active predominantly in seed tissue, but not necessarily exclusively in seed tissue (in cases of leaky expression). The seed-specific promoter may be active during seed development and/or during germination. The seed specific promoter may be endosperm/aleurone/embryo specific. Examples of seed-specific promoters (endosperm/aleurone/embryo specific) are shown in Table 2d, 2e, 2f. Further examples of seed-specific promoters are given in Qing Qu and Takaiwa (Plant Biotechnol. J. 2, 113-125, 2004), which disclosure is incorporated by reference herein as if fully set forth.

TABLE 2c
Examples of seed-specific promoters

| Gene source | Reference |
|---|---|
| seed-specific genes | Simon et al., Plant Mol. Biol. 5: 191, 1985; |
| | Scofield et al., J. Biol. Chem. 262: 12202, |
| | 1987.; Baszczynski et al., Plant Mol. Biol. 14: |
| | 633, 1990. |
| Brazil Nut albumin | Pearson et al., Plant Mol. Biol. 18: 235-245, |
| | 1992. |
| legumin | Ellis et al., Plant Mol. Biol. 10: 203-214, 1988. |
| glutelin (rice) | Takaiwa et al., Mol. Gen. Genet. 208: 15-22, |
| | 1986; Takaiwa et al., FEBS Letts. 221: 43-47, |
| | 1987. |
| zein | Matzke et al Plant Mol Biol, 14(3):323-32 |
| | 1990 |
| napA | Stalberg et al, Planta 199: 515-519, 1996. |
| wheat LMW and HMW | Mol Gen Genet 216:81-90, 1989; NAR |
| glutenin-1 | 17:461-2, 1989 |
| wheat SPA | Albani et al, Plant Cell, 9: 171-184, 1997 |
| wheat α, β, γ-gliadins | EMBO J. 3:1409-15, 1984 |
| barley Itr1 promoter | Diaz et al. (1995) Mol Gen Genet 248(5):592-8 |
| barley B1, C, D, hordein | Theor Appl Gen 98:1253-62, 1999; Plant J |
| | 4:343-55, 1993; Mol Gen Genet 250:750-60, |
| | 1996 |
| barley DOF | Mena et al, The Plant Journal, 116(1): 53-62, |
| | 1998 |
| blz2 | EP99106056.7 |
| synthetic promoter | Vicente-Carbajosa et al., Plant J. 13: 629-640, |
| | 1998. |
| rice prolamin NRP33 | Wu et al, Plant Cell Physiology 39(8) 885-889, |
| | 1998 |
| rice a-globulin Glb-1 | Wu et al, Plant Cell Physiology 39(8) 885-889, |
| | 1998 |
| rice OSH1 | Sato et al, Proc. Natl. Acad. Sci. USA, 93: |
| | 8117-8122, 1996 |
| rice α-globulin REB/OHP-1 | Nakase et al. Plant Mol. Biol. 33: 513-522, |
| | 1997 |
| rice ADP-glucose pyrophos- | Trans Res 6:157-68, 1997 |
| phorylase | |
| maize ESR gene family | Plant J 12:235-46, 1997 |
| sorghum α-kafirin | DeRose et al., Plant Mol. Biol 32:1029-35, |
| | 1996 |
| KNOX | Postma-Haarsma et al, Plant Mol. Biol. |
| | 39:257-71, 1999 |
| rice oleosin | Wu et al, J. Biochem. 123:386, 1998 |
| sunflower oleosin | Cummins et al., Plant Mol. Biol. 19: 873-876, |
| | 1992 |
| PRO0117, putative rice 40S | WO 2004/070039 |
| ribosomal protein | |
| PRO0136, rice alanine | unpublished |
| aminotransferase | |
| PRO0147, trypsin inhibitor | unpublished |
| ITR1 (barley) | |
| PRO0151, rice WSI18 | WO 2004/070039 |
| PRO0175, rice RAB21 | WO 2004/070039 |
| PRO005 | WO 2004/070039 |
| PRO0095 | WO 2004/070039 |
| α-amylase (Amy32b) | Lanahan et al, Plant Cell 4:203-211, 1992; |
| | Skriver et al, Proc Natl Acad Sci USA |
| | 88:7266-7270, 1991 |
| cathepsin β-like gene | Cejudo et al, Plant Mol Biol 20:849-856, 1992 |
| Barley Ltp2 | Kalla et al., Plant J. 6:849-60, 1994 |
| Chi26 | Leah et al., Plant J. 4:579-89, 1994 |
| Maize B-Peru | Selinger et al., Genetics 149;1125-38,1998 |

TABLE 2d
examples of endosperm-specific promoters

| Gene source | Reference |
|---|---|
| glutelin (rice) | Takaiwa et al. (1986) Mol Gen Genet 208:15-22; |
| | Takaiwa et al. (1987) FEBS Letts. 221:43-47 |
| zein | Matzke et al., (1990) Plant Mol Biol 14(3): |
| | 323-32 |
| wheat LMW and HMW | Colot et al. (1989) Mol Gen Genet 216:81-90, |
| glutenin-1 | Anderson et al. (1989) NAR 17:461-2 |
| wheat SPA | Albani et al. (1997) Plant Cell 9:171-184 |
| wheat gliadins | Rafalski et al. (1984) EMBO 3:1409-15 |
| barley Itr1 promoter | Diaz et al. (1995) Mol Gen Genet 248(5):592-8 |
| barley B1, C, D, hordein | Cho et al. (1999) Theor Appl Genet 98:1253-62; |
| | Muller et al. (1993) Plant J 4:343-55; |
| | Sorenson et al. (1996) Mol Gen Genet |
| | 250:750-60 |
| barley DOF | Mena et al, (1998) Plant J 116(1): 53-62 |
| blz2 | Onate et al. (1999) J Biol Chem 274(14):9175-82 |
| synthetic promoter | Vicente-Carbajosa et al. (1998) Plant J |
| | 13:629-640 |
| rice prolamin NRP33 | Wu et al, (1998) Plant Cell Physiol 39(8) 885-889 |
| rice globulin Glb-1 | Wu et al. (1998) Plant Cell Physiol 39(8) 885-889 |
| rice globulin REB/OHP-1 | Nakase et al. (1997) Plant Molec Biol 33: |
| | 513-522 |
| rice ADP-glucose | Russell et al. (1997) Trans Res 6:157-68 |
| pyrophosphorylase | |
| maize ESR gene family | Opsahl-Ferstad et al. (1997) Plant J 12:235-46 |
| sorghum kafirin | DeRose et al. (1996) Plant Mol Biol 32:1029-35 |

TABLE 2e
Examples of embryo specific promoters:

| Gene source | Reference |
|---|---|
| rice OSH1 | Sato et al, Proc. Natl. Acad. Sci. USA, 93: 8117-8122, 1996 |
| KNOX | Postma-Haarsma et al, Plant Mol. Biol. 39:257-71, 1999 |
| PRO0151 | WO 2004/070039 |
| PRO0175 | WO 2004/070039 |
| PRO005 | WO 2004/070039 |
| PRO0095 | WO 2004/070039 |

TABLE 2f
Examples of aleurone-specific promoters:

| Gene source | Reference |
|---|---|
| α-amylase (Amy32b) | Lanahan et al, Plant Cell 4:203-211, 1992; |
| | Skriver et al, Proc Natl Acad Sci USA 88:7266-7270, |
| | 1991 |
| cathepsin β-like gene | Cejudo et al, Plant Mol Biol 20:849-856, 1992 |
| Barley Ltp2 | Kalla et al., Plant J. 6:849-60, 1994 |
| Chi26 | Leah et al., Plant J. 4:579-89, 1994 |
| Maize B-Peru | Selinger et al., Genetics 149;1125-38,1998 |

[0093] A green tissue-specific promoter as defined herein is a promoter that is transcriptionally active predominantly in green tissue, substantially to the exclusion of any other parts of a plant, whilst still allowing for any leaky expression in these other plant parts.

[0094] Examples of green tissue-specific promoters which may be used to perform the methods of the invention are shown in Table 2g.

TABLE 2g
Examples of green tissue-specific promoters

| Gene | Expression | Reference |
|---|---|---|
| Maize Orthophosphate dikinase | Leaf specific | Fukavama et al., 2001 |
| Maize Phosphoenolpyruvate | Leaf specific | Kausch et al., 2001 |
| carboxylase | | |
| Rice Phosphoenolpyruvate | Leaf specific | Liu et al., 2003 |
| carboxylase | | |
| Rice small subunit Rubisco | Leaf specific | Nomura et al., 2000 |
| rice beta expansin EXBP9 | Shoot specific | WO 2004/070039 |
| Pigeonpea small subunit Rubisco | Leaf specific | Panguluri et al., 2005 |
| Pea RBCS3A | Leaf specific | |

[0095] Another example of a tissue-specific promoter is a meristem-specific promoter, which is transcriptionally active predominantly in meristematic tissue, substantially to the exclusion of any other parts of a plant, whilst still allowing for any leaky expression in these other plant parts. Examples of green meristem-specific promoters which may be used to perform the methods of the invention are shown in Table 2h below.

TABLE 2h
Examples of meristem-specific promoters

| Gene source | Expression pattern | Reference |
|---|---|---|
| rice OSH1 | Shoot apical meristem, | Sato et al. (1996) Proc. |
| | from embryo globular | Natl. Acad. Sci. USA, 93: |
| | stage to seedling stage | 8117-8122 |
| Rice | Meristem specific | BAD87835.1 |
| metallothionein | | |
| WAK1 & | Shoot and root apical | Wagner & Kohorn (2001) |
| WAK 2 | meristems, and in | Plant Cell 13(2): 303-318 |
| | expanding leaves | |
| | and sepals | |

### Terminator

[0096] The term “terminator” encompasses a control sequence which is a DNA sequence at the end of a transcriptional unit which signals 3′ processing and polyadenylation of a primary transcript and termination of transcription. The terminator can be derived from the natural gene, from a variety of other plant genes, or from T-DNA. The terminator to be added may be derived from, for example, the nopaline synthase or octopine synthase genes, or alternatively from another plant gene, or less preferably from any other eukaryotic gene.

### Modulation

[0097] The term “modulation” means in relation to expression or gene expression, a process in which the expression level is changed by said gene expression in comparison to the control plant, the expression level may be increased or decreased. The original, unmodulated expression may be of any kind of expression of a structural RNA (rRNA, tRNA) or mRNA with subsequent translation. The term “modulating the activity” shall mean any change of the expression of the inventive nucleic acid sequences or encoded proteins, which leads to increased yield and/or increased growth of the plants.

### Expression

[0098] The term “expression” or “gene expression” means the transcription of a specific gene or specific genes or specific genetic construct. The term “expression” or “gene expression” in particular means the transcription of a gene or genes or genetic construct into structural RNA (rRNA, tRNA) or mRNA with or without subsequent translation of the latter into a protein. The process includes transcription of DNA and processing of the resulting mRNA product.

### Increased Expression/Overexpression

[0099] The term “increased expression” or “overexpression” as used herein means any form of expression that is additional to the original wild-type expression level.

[0100] Methods for increasing expression of genes or gene products are well documented in the art and include, for example, overexpression driven by appropriate promoters, the use of transcription enhancers or translation enhancers. Isolated nucleic acids which serve as promoter or enhancer elements may be introduced in an appropriate position (typically upstream) of a non-heterologous form of a polynucleotide so as to upregulate expression of a nucleic acid encoding the polypeptide of interest. For example, endogenous promoters may be altered in vivo by mutation, deletion, and/or substitution (see, Kmiec, U.S. Pat. No. 5,565,350; Zarling et al., WO9322443), or isolated promoters may be introduced into a plant cell in the proper orientation and distance from a gene of the present invention so as to control the expression of the gene.

[0101] If polypeptide expression is desired, it is generally desirable to include a polyadenylation region at the 3′-end of a polynucleotide coding region. The polyadenylation region can be derived from the natural gene, from a variety of other plant genes, or from T-DNA. The 3′ end sequence to be added may be derived from, for example, the nopaline synthase or octopine synthase genes, or alternatively from another plant gene, or less preferably from any other eukaryotic gene.

[0102] An intron sequence may also be added to the 5′ untranslated region (UTR) or the coding sequence of the partial coding sequence to increase the amount of the mature message that accumulates in the cytosol. Inclusion of a spliceable intron in the transcription unit in both plant and animal expression constructs has been shown to increase gene expression at both the mRNA and protein levels up to 1000-fold (Buchman and Berg (1988) Mol. Cell biol. 8: 4395-4405; Callis et al. (1987) Genes Dev 1:1183-1200). Such intron enhancement of gene expression is typically greatest when placed near the 5′ end of the transcription unit. Use of the maize introns Adh1-S intron 1, 2, and 6, the Bronze-1 intron are known in the art. For general information see: The Maize Handbook, Chapter 116, Freeling and Walbot, Eds., Springer, N.Y. (1994).

### Endogenous Gene

[0103] Reference herein to an “endogenous” gene not only refers to the gene in question as found in a plant in its natural form (i.e., without there being any human intervention), but also refers to that same gene (or a substantially homologous nucleic acid/gene) in an isolated form subsequently (re)introduced into a plant (a transgene). For example, a transgenic plant containing such a transgene may encounter a substantial reduction of the transgene expression and/or substantial reduction of expression of the endogenous gene. The isolated gene may be isolated from an organism or may be manmade, for example by chemical synthesis.

### Decreased Expression

[0104] Reference herein to “decreased expression” or “reduction or substantial elimination” of expression is taken to mean a decrease in endogenous gene expression and/or polypeptide levels and/or polypeptide activity relative to control plants. The reduction or substantial elimination is in increasing order of preference at least 10%, 20%, 30%, 40% or 50%, 60%, 70%, 80%, 85%, 90%, or 95%, 96%, 97%, 98%, 99% or more reduced compared to that of control plants.

[0105] For the reduction or substantial elimination of expression an endogenous gene in a plant, a sufficient length of substantially contiguous nucleotides of a nucleic acid sequence is required. In order to perform gene silencing, this may be as little as 20, 19, 18, 17, 16, 15, 14, 13, 12, 11, 10 or fewer nucleotides, alternatively this may be as much as the entire gene (including the 5′ and/or 3′ UTR, either in part or in whole). The stretch of substantially contiguous nucleotides may be derived from the nucleic acid encoding the protein of interest (target gene), or from any nucleic acid capable of encoding an orthologue, paralogue or homologue of the protein of interest. Preferably, the stretch of substantially contiguous nucleotides is capable of forming hydrogen bonds with the target gene (either sense or antisense strand), more preferably, the stretch of substantially contiguous nucleotides has, in increasing order of preference, 50%, 60%, 70%, 80%, 85%, 90%, 95%, 96%, 97%, 98%, 99%, 100% sequence identity to the target gene (either sense or antisense strand). A nucleic acid sequence encoding a (functional) polypeptide is not a requirement for the various methods discussed herein for the reduction or substantial elimination of expression of an endogenous gene.

[0106] This reduction or substantial elimination of expression may be achieved using routine tools and techniques. A preferred method for the reduction or substantial elimination of endogenous gene expression is by introducing and expressing in a plant a genetic construct into which the nucleic acid (in this case a stretch of substantially contiguous nucleotides derived from the gene of interest, or from any nucleic acid capable of encoding an orthologue, paralogue or homologue of any one of the protein of interest) is cloned as an inverted repeat (in part or completely), separated by a spacer (non-coding DNA).

[0107] In such a preferred method, expression of the endogenous gene is reduced or substantially eliminated through RNA-mediated silencing using an inverted repeat of a nucleic acid or a part thereof (in this case a stretch of substantially contiguous nucleotides derived from the gene of interest, or from any nucleic acid capable of encoding an orthologue, paralogue or homologue of the protein of interest), preferably capable of forming a hairpin structure. The inverted repeat is cloned in an expression vector comprising control sequences. A non-coding DNA nucleic acid sequence (a spacer, for example a matrix attachment region fragment (MAR), an intron, a polylinker, etc.) is located between the two inverted nucleic acids forming the inverted repeat. After transcription of the inverted repeat, a chimeric RNA with a self-complementary structure is formed (partial or complete). This double-stranded RNA structure is referred to as the hairpin RNA (hpRNA). The hpRNA is processed by the plant into siRNAs that are incorporated into an RNA-induced silencing complex (RISC). The RISC further cleaves the mRNA transcripts, thereby substantially reducing the number of mRNA transcripts to be translated into polypeptides. For further general details see for example, Grierson et al. (1998) WO 98/53083; Waterhouse et al. (1999) WO 99/53050).

[0108] Performance of the methods of the invention does not rely on introducing and expressing in a plant a genetic construct into which the nucleic acid is cloned as an inverted repeat, but any one or more of several well-known “gene silencing” methods may be used to achieve the same effects.

[0109] One such method for the reduction of endogenous gene expression is RNA-mediated silencing of gene expression (downregulation). Silencing in this case is triggered in a plant by a double stranded RNA sequence (dsRNA) that is substantially similar to the target endogenous gene.

[0110] This dsRNA is further processed by the plant into about 20 to about 26 nucleotides called short interfering RNAs (siRNAs). The siRNAs are incorporated into an RNA-induced silencing complex (RISC) that cleaves the mRNA transcript of the endogenous target gene, thereby substantially reducing the number of mRNA transcripts to be translated into a polypeptide. Preferably, the double stranded RNA sequence corresponds to a target gene.

[0111] Another example of an RNA silencing method involves the introduction of nucleic acid sequences or parts thereof (in this case a stretch of substantially contiguous nucleotides derived from the gene of interest, or from any nucleic acid capable of encoding an orthologue, paralogue or homologue of the protein of interest) in a sense orientation into a plant. “Sense orientation” refers to a DNA sequence that is homologous to an mRNA transcript thereof. Introduced into a plant would therefore be at least one copy of the nucleic acid sequence. The additional nucleic acid sequence will reduce expression of the endogenous gene, giving rise to a phenomenon known as co-suppression. The reduction of gene expression will be more pronounced if several additional copies of a nucleic acid sequence are introduced into the plant, as there is a positive correlation between high transcript levels and the triggering of co-suppression.

[0112] Another example of an RNA silencing method involves the use of antisense nucleic acid sequences. An “antisense” nucleic acid sequence comprises a nucleotide sequence that is complementary to a “sense” nucleic acid sequence encoding a protein, i.e. complementary to the coding strand of a double-stranded cDNA molecule or complementary to an mRNA transcript sequence. The antisense nucleic acid sequence is preferably complementary to the endogenous gene to be silenced. The complementarity may be located in the “coding region” and/or in the “non-coding region” of a gene. The term “coding region” refers to a region of the nucleotide sequence comprising codons that are translated into amino acid residues. The term “non-coding region” refers to 5′ and 3′ sequences that flank the coding region that are transcribed but not translated into amino acids (also referred to as 5′ and 3′ untranslated regions).

[0113] Antisense nucleic acid sequences can be designed according to the rules of Watson and Crick base pairing. The antisense nucleic acid sequence may be complementary to the entire nucleic acid sequence (in this case a stretch of substantially contiguous nucleotides derived from the gene of interest, or from any nucleic acid capable of encoding an orthologue, paralogue or homologue of the protein of interest), but may also be an oligonucleotide that is antisense to only a part of the nucleic acid sequence (including the mRNA 5′ and 3′ UTR). For example, the antisense oligonucleotide sequence may be complementary to the region surrounding the translation start site of an mRNA transcript encoding a polypeptide. The length of a suitable antisense oligonucleotide sequence is known in the art and may start from about 50, 45, 40, 35, 30, 25, 20, 15 or 10 nucleotides in length or less. An antisense nucleic acid sequence according to the invention may be constructed using chemical synthesis and enzymatic ligation reactions using methods known in the art. For example, an antisense nucleic acid sequence (e.g., an antisense oligonucleotide sequence) may be chemically synthesized using naturally occurring nucleotides or variously modified nucleotides designed to increase the biological stability of the molecules or to increase the physical stability of the duplex formed between the antisense and sense nucleic acid sequences, e.g., phosphorothioate derivatives and acridine substituted nucleotides may be used. Examples of modified nucleotides that may be used to generate the antisense nucleic acid sequences are well known in the art. Known nucleotide modifications include methylation, cyclization and ‘caps’ and substitution of one or more of the naturally occurring nucleotides with an analogue such as inosine. Other modifications of nucleotides are well known in the art.

[0114] The antisense nucleic acid sequence can be produced biologically using an expression vector into which a nucleic acid sequence has been subcloned in an antisense orientation (i.e., RNA transcribed from the inserted nucleic acid will be of an antisense orientation to a target nucleic acid of interest). Preferably, production of antisense nucleic acid sequences in plants occurs by means of a stably integrated nucleic acid construct comprising a promoter, an operably linked antisense oligonucleotide, and a terminator.

[0115] The nucleic acid molecules used for silencing in the methods of the invention (whether introduced into a plant or generated in situ) hybridize with or bind to mRNA transcripts and/or genomic DNA encoding a polypeptide to thereby inhibit expression of the protein, e.g., by inhibiting transcription and/or translation. The hybridization can be by conventional nucleotide complementarity to form a stable duplex, or, for example, in the case of an antisense nucleic acid sequence which binds to DNA duplexes, through specific interactions in the major groove of the double helix. Antisense nucleic acid sequences may be introduced into a plant by transformation or direct injection at a specific tissue site. Alternatively, antisense nucleic acid sequences can be modified to target selected cells and then administered systemically. For example, for systemic administration, antisense nucleic acid sequences can be modified such that they specifically bind to receptors or antigens expressed on a selected cell surface, e.g., by linking the antisense nucleic acid sequence to peptides or antibodies which bind to cell surface receptors or antigens. The antisense nucleic acid sequences can also be delivered to cells using the vectors described herein.

[0116] According to a further aspect, the antisense nucleic acid sequence is an a-anomeric nucleic acid sequence. An a-anomeric nucleic acid sequence forms specific double-stranded hybrids with complementary RNA in which, contrary to the usual b-units, the strands run parallel to each other (Gaultier et al. (1987) Nucl Ac Res 15: 6625-6641). The antisense nucleic acid sequence may also comprise a 2′-o-methylribonucleotide (Inoue et al. (1987) Nucl Ac Res 15, 6131-6148) or a chimeric RNA-DNA analogue (Inoue et al. (1987) FEBS Lett. 215, 327-330).

[0117] The reduction or substantial elimination of endogenous gene expression may also be performed using ribozymes. Ribozymes are catalytic RNA molecules with ribonuclease activity that are capable of cleaving a single-stranded nucleic acid sequence, such as an mRNA, to which they have a complementary region. Thus, ribozymes (e.g., hammerhead ribozymes (described in Haselhoff and Gerlach (1988) Nature 334, 585-591) can be used to catalytically cleave mRNA transcripts encoding a polypeptide, thereby substantially reducing the number of mRNA transcripts to be translated into a polypeptide. A ribozyme having specificity for a nucleic acid sequence can be designed (see for example: Cech et al. U.S. Pat. No. 4,987,071; and Cech et al. U.S. Pat. No. 5,116,742). Alternatively, mRNA transcripts corresponding to a nucleic acid sequence can be used to select a catalytic RNA having a specific ribonuclease activity from a pool of RNA molecules (Bartel and Szostak (1993) Science 261, 1411-1418). The use of ribozymes for gene silencing in plants is known in the art (e.g., Atkins et al. (1994) WO 94/00012; Lenne et al. (1995) WO 95/03404; Lutziger et al. (2000) WO 00/00619; Prinsen et al. (1997) WO 97/13865 and Scott et al. (1997) WO 97/38116).

[0118] Gene silencing may also be achieved by insertion mutagenesis (for example, T-DNA insertion or transposon insertion) or by strategies as described by, among others, Angell and Baulcombe ((1999) Plant J 20(3): 357-62), (Amplicon VIGS WO 98/36083), or Baulcombe (WO 99/15682).

[0119] Gene silencing may also occur if there is a mutation on an endogenous gene and/or a mutation on an isolated gene/nucleic acid subsequently introduced into a plant. The reduction or substantial elimination may be caused by a non-functional polypeptide. For example, the polypeptide may bind to various interacting proteins; one or more mutation(s) and/or truncation(s) may therefore provide for a polypeptide that is still able to bind interacting proteins (such as receptor proteins) but that cannot exhibit its normal function (such as signalling ligand).

[0120] A further approach to gene silencing is by targeting nucleic acid sequences complementary to the regulatory region of the gene (e.g., the promoter and/or enhancers) to form triple helical structures that prevent transcription of the gene in target cells. See Helene, C., Anticancer Drug Res. 6, 569-84, 1991; Helene et al., Ann. N.Y. Acad. Sci. 660, 27-36 1992; and Maher, L. J. Bioassays 14, 807-15, 1992.

[0121] Other methods, such as the use of antibodies directed to an endogenous polypeptide for inhibiting its function in planta, or interference in the signalling pathway in which a polypeptide is involved, will be well known to the skilled man. In particular, it can be envisaged that manmade molecules may be useful for inhibiting the biological function of a target polypeptide, or for interfering with the signalling pathway in which the target polypeptide is involved.

[0122] Alternatively, a screening program may be set up to identify in a plant population natural variants of a gene, which variants encode polypeptides with reduced activity. Such natural variants may also be used for example, to perform homologous recombination.

[0123] Artificial and/or natural microRNAs (miRNAs) may be used to knock out gene expression and/or mRNA translation. Endogenous miRNAs are single stranded small RNAs of typically 19-24 nucleotides long. They function primarily to regulate gene expression and/or mRNA translation. Most plant microRNAs (miRNAs) have perfect or near-perfect complementarity with their target sequences. However, there are natural targets with up to five mismatches. They are processed from longer non-coding RNAs with characteristic fold-back structures by double-strand specific RNases of the Dicer family. Upon processing, they are incorporated in the RNA-induced silencing complex (RISC) by binding to its main component, an Argonaute protein. MiRNAs serve as the specificity components of RISC, since they base-pair to target nucleic acids, mostly mRNAs, in the cytoplasm. Subsequent regulatory events include target mRNA cleavage and destruction and/or translational inhibition. Effects of miRNA overexpression are thus often reflected in decreased mRNA levels of target genes.

[0124] Artificial microRNAs (amiRNAs), which are typically 21 nucleotides in length, can be genetically engineered specifically to negatively regulate gene expression of single or multiple genes of interest. Determinants of plant microRNA target selection are well known in the art. Empirical parameters for target recognition have been defined and can be used to aid in the design of specific amiRNAs, (Schwab et al., Dev. Cell 8, 517-527, 2005). Convenient tools for design and generation of amiRNAs and their precursors are also available to the public (Schwab et al., Plant Cell 18, 1121-1133, 2006).

[0125] For optimal performance, the gene silencing techniques used for reducing expression in a plant of an endogenous gene requires the use of nucleic acid sequences from monocotyledonous plants for transformation of monocotyledonous plants, and from dicotyledonous plants for transformation of dicotyledonous plants. Preferably, a nucleic acid sequence from any given plant species is introduced into that same species. For example, a nucleic acid sequence from rice is transformed into a rice plant. However, it is not an absolute requirement that the nucleic acid sequence to be introduced originates from the same plant species as the plant in which it will be introduced. It is sufficient that there is substantial homology between the endogenous target gene and the nucleic acid to be introduced.

[0126] Described above are examples of various methods for the reduction or substantial elimination of expression in a plant of an endogenous gene. A person skilled in the art would readily be able to adapt the aforementioned methods for silencing so as to achieve reduction of expression of an endogenous gene in a whole plant or in parts thereof through the use of an appropriate promoter, for example.

### Selectable Marker (Gene)/Reporter Gene

[0127] “Selectable marker”, “selectable marker gene” or “reporter gene” includes any gene that confers a phenotype on a cell in which it is expressed to facilitate the identification and/or selection of cells that are transfected or transformed with a nucleic acid construct of the invention. These marker genes enable the identification of a successful transfer of the nucleic acid molecules via a series of different principles. Suitable markers may be selected from markers that confer antibiotic or herbicide resistance, that introduce a new metabolic trait or that allow visual selection. Examples of selectable marker genes include genes conferring resistance to antibiotics (such as nptII that phosphorylates neomycin and kanamycin, or hpt, phosphorylating hygromycin, or genes conferring resistance to, for example, bleomycin, streptomycin, tetracyclin, chloramphenicol, ampicillin, gentamycin, geneticin (G418), spectinomycin or blasticidin), to herbicides (for example bar which provides resistance to Basta®; aroA or gox providing resistance against glyphosate, or the genes conferring resistance to, for example, imidazolinone, phosphinothricin or sulfonylurea), or genes that provide a metabolic trait (such as manA that allows plants to use mannose as sole carbon source or xylose isomerase for the utilisation of xylose, or antinutritive markers such as the resistance to 2-deoxyglucose). Expression of visual marker genes results in the formation of colour (for example β-glucuronidase, GUS or β-galactosidase with its coloured substrates, for example X-Gal), luminescence (such as the luciferin/luceferase system) or fluorescence (Green Fluorescent Protein, GFP, and derivatives thereof). This list represents only a small number of possible markers. The skilled worker is familiar with such markers. Different markers are preferred, depending on the organism and the selection method.

[0128] It is known that upon stable or transient integration of nucleic acids into plant cells, only a minority of the cells takes up the foreign DNA and, if desired, integrates it into its genome, depending on the expression vector used and the transfection technique used. To identify and select these integrants, a gene coding for a selectable marker (such as the ones described above) is usually introduced into the host cells together with the gene of interest. These markers can for example be used in mutants in which these genes are not functional by, for example, deletion by conventional methods. Furthermore, nucleic acid molecules encoding a selectable marker can be introduced into a host cell on the same vector that comprises the sequence encoding the polypeptides of the invention or used in the methods of the invention, or else in a separate vector. Cells which have been stably transfected with the introduced nucleic acid can be identified for example by selection (for example, cells which have integrated the selectable marker survive whereas the other cells die).

[0129] Since the marker genes, particularly genes for resistance to antibiotics and herbicides, are no longer required or are undesired in the transgenic host cell once the nucleic acids have been introduced successfully, the process according to the invention for introducing the nucleic acids advantageously employs techniques which enable the removal or excision of these marker genes. One such a method is what is known as co-transformation. The co-transformation method employs two vectors simultaneously for the transformation, one vector bearing the nucleic acid according to the invention and a second bearing the marker gene(s).

[0130] A large proportion of transformants receives or, in the case of plants, comprises (up to 40% or more of the transformants), both vectors. In case of transformation with Agrobacteria, the transformants usually receive only a part of the vector, i.e. the sequence flanked by the T-DNA, which usually represents the expression cassette. The marker genes can subsequently be removed from the transformed plant by performing crosses. In another method, marker genes integrated into a transposon are used for the transformation together with desired nucleic acid (known as the Ac/Ds technology). The transformants can be crossed with a transposase source or the transformants are transformed with a nucleic acid construct conferring expression of a transposase, transiently or stable. In some cases (approx. 10%), the transposon jumps out of the genome of the host cell once transformation has taken place successfully and is lost. In a further number of cases, the transposon jumps to a different location. In these cases the marker gene must be eliminated by performing crosses. In microbiology, techniques were developed which make possible, or facilitate, the detection of such events. A further advantageous method relies on what is known as recombination systems; whose advantage is that elimination by crossing can be dispensed with. The best-known system of this type is what is known as the Cre/lox system. Cre1 is a recombinase that removes the sequences located between the loxP sequences. If the marker gene is integrated between the loxP sequences, it is removed once transformation has taken place successfully, by expression of the recombinase. Further recombination systems are the HIN/HIX, FLP/FRT and REP/STB system (Tribble et al., J. Biol. Chem., 275, 2000: 22255-22267; Velmurugan et al., J. Cell Biol., 149, 2000: 553-566). A site-specific integration into the plant genome of the nucleic acid sequences according to the invention is possible. Naturally, these methods can also be applied to microorganisms such as yeast, fungi or bacteria.

### Transgenic/Transgene/Recombinant

[0131] For the purposes of the invention, “transgenic”, “transgene” or “recombinant” means with regard to, for example, a nucleic acid sequence, an expression cassette, gene construct or a vector comprising the nucleic acid sequence or an organism transformed with the nucleic acid sequences, expression cassettes or vectors according to the invention, all those constructions brought about by recombinant methods in which either
[0132] (a) the nucleic acid sequences encoding proteins useful in the methods of the invention, or
[0133] (b) genetic control sequence(s) which is operably linked with the nucleic acid sequence according to the invention, for example a promoter, or
[0134] (c) a) and b)
   are not located in their natural genetic environment or have been modified by recombinant methods, it being possible for the modification to take the form of, for example, a substitution, addition, deletion, inversion or insertion of one or more nucleotide residues. The natural genetic environment is understood as meaning the natural genomic or chromosomal locus in the original plant or the presence in a genomic library. In the case of a genomic library, the natural genetic environment of the nucleic acid sequence is preferably retained, at least in part. The environment flanks the nucleic acid sequence at least on one side and has a sequence length of at least 50 bp, preferably at least 500 bp, especially preferably at least 1000 bp, most preferably at least 5000 bp. A naturally occurring expression cassette—for example the naturally occurring combination of the natural promoter of the nucleic acid sequences with the corresponding nucleic acid sequence encoding a polypeptide useful in the methods of the present invention, as defined above—becomes a transgenic expression cassette when this expression cassette is modified by non-natural, synthetic (“artificial”) methods such as, for example, mutagenic treatment. Suitable methods are described, for example, in U.S. Pat. No. 5,565,350 or WO 00/15815.

[0135] A transgenic plant for the purposes of the invention is thus understood as meaning, as above, that the nucleic acids used in the method of the invention are not at their natural locus in the genome of said plant, it being possible for the nucleic acids to be expressed homologously or heterologously. However, as mentioned, transgenic also means that, while the nucleic acids according to the invention or used in the inventive method are at their natural position in the genome of a plant, the sequence has been modified with regard to the natural sequence, and/or that the regulatory sequences of the natural sequences have been modified. Transgenic is preferably understood as meaning the expression of the nucleic acids according to the invention at an unnatural locus in the genome, i.e. homologous or, preferably, heterologous expression of the nucleic acids takes place. Preferred transgenic plants are mentioned herein.

### Transformation

[0136] The term “introduction” or “transformation” as referred to herein encompasses the transfer of an exogenous polynucleotide into a host cell, irrespective of the method used for transfer. Plant tissue capable of subsequent clonal propagation, whether by organogenesis or embryogenesis, may be transformed with a genetic construct of the present invention and a whole plant regenerated there from. The particular tissue chosen will vary depending on the clonal propagation systems available for, and best suited to, the particular species being transformed. Exemplary tissue targets include leaf disks, pollen, embryos, cotyledons, hypocotyls, megagametophytes, callus tissue, existing meristematic tissue (e.g., apical meristem, axillary buds, and root meristems), and induced meristem tissue (e.g., cotyledon meristem and hypocotyl meristem). The polynucleotide may be transiently or stably introduced into a host cell and may be maintained non-integrated, for example, as a plasmid. Alternatively, it may be integrated into the host genome. The resulting transformed plant cell may then be used to regenerate a transformed plant in a manner known to persons skilled in the art.

[0137] The transfer of foreign genes into the genome of a plant is called transformation. Transformation of plant species is now a fairly routine technique. Advantageously, any of several transformation methods may be used to introduce the gene of interest into a suitable ancestor cell. The methods described for the transformation and regeneration of plants from plant tissues or plant cells may be utilized for transient or for stable transformation. Transformation methods include the use of liposomes, electroporation, chemicals that increase free DNA uptake, injection of the DNA directly into the plant, particle gun bombardment, transformation using viruses or pollen and microprojection. Methods may be selected from the calcium/polyethylene glycol method for protoplasts (Krens, F. A. et al., (1982) Nature 296, 72-74; Negrutiu I et al. (1987) Plant Mol Biol 8: 363-373); electroporation of protoplasts (Shillito R. D. et al. (1985) Bio/Technol 3, 1099-1102); microinjection into plant material (Crossway A et al., (1986) Mol. Gen Genet 202: 179-185); DNA or RNA-coated particle bombardment (Klein T M et al., (1987) Nature 327: 70) infection with (non-integrative) viruses and the like. Transgenic plants, including transgenic crop plants, are preferably produced via Agrobacterium-mediated transformation. An advantageous transformation method is the transformation in planta. To this end, it is possible, for example, to allow the agrobacteria to act on plant seeds or to inoculate the plant meristem with agrobacteria. It has proved particularly expedient in accordance with the invention to allow a suspension of transformed agrobacteria to act on the intact plant or at least on the flower primordia. The plant is subsequently grown on until the seeds of the treated plant are obtained (Clough and Bent, Plant J. (1998) 16, 735-743). Methods for Agrobacterium-mediated transformation of rice include well known methods for rice transformation, such as those described in any of the following: European patent application EP 1198985 A1, Aldemita and Hodges (Planta 199: 612-617, 1996); Chan et al. (Plant Mol Biol 22 (3): 491-506, 1993), Hiei et al. (Plant J 6 (2): 271-282, 1994), which disclosures are incorporated by reference herein as if fully set forth. In the case of corn transformation, the preferred method is as described in either Ishida et al. (Nat. Biotechnol 14(6): 745-50, 1996) or Frame et al. (Plant Physiol 129(1): 13-22, 2002), which disclosures are incorporated by reference herein as if fully set forth. Said methods are further described by way of example in B. Jenes et al., Techniques for Gene Transfer, in: Transgenic Plants, Vol. 1, Engineering and Utilization, eds. S. D. Kung and R. Wu, Academic Press (1993) 128-143 and in Potrykus Annu. Rev. Plant Physiol. Plant Molec. Biol. 42 (1991) 205-225). The nucleic acids or the construct to be expressed is preferably cloned into a vector, which is suitable for transforming Agrobacterium tumefaciens, for example pBin19 (Bevan et al., Nucl. Acids Res. 12 (1984) 8711). Agrobacteria transformed by such a vector can then be used in known manner for the transformation of plants, such as plants used as a model, like Arabidopsis (Arabidopsis thaliana is within the scope of the present invention not considered as a crop plant), or crop plants such as, by way of example, tobacco plants, for example by immersing bruised leaves or chopped leaves in an agrobacterial solution and then culturing them in suitable media. The transformation of plants by means of Agrobacterium tumefaciens is described, for example, by Hofgen and Willmitzer in Nucl. Acid Res. (1988) 16, 9877 or is known inter alia from F. F. White, Vectors for Gene Transfer in Higher Plants; in Transgenic Plants, Vol. 1, Engineering and Utilization, eds. S. D. Kung and R. Wu, Academic Press, 1993, pp. 15-38.

[0138] In addition to the transformation of somatic cells, which then have to be regenerated into intact plants, it is also possible to transform the cells of plant meristems and in particular those cells which develop into gametes. In this case, the transformed gametes follow the natural plant development, giving rise to transgenic plants. Thus, for example, seeds of Arabidopsis are treated with agrobacteria and seeds are obtained from the developing plants of which a certain proportion is transformed and thus transgenic [Feldman, K A and Marks M D (1987). Mol Gen Genet 208:274-289; Feldmann K (1992). In: C Koncz, N-H Chua and J Shell, eds, Methods in Arabidopsis Research. Word Scientific, Singapore, pp. 274-289]. Alternative methods are based on the repeated removal of the inflorescences and incubation of the excision site in the center of the rosette with transformed agrobacteria, whereby transformed seeds can likewise be obtained at a later point in time (Chang (1994). Plant J. 5: 551-558; Katavic (1994). Mol Gen Genet, 245: 363-370). However, an especially effective method is the vacuum infiltration method with its modifications such as the “floral dip” method. In the case of vacuum infiltration of Arabidopsis, intact plants under reduced pressure are treated with an agrobacterial suspension [Bechthold, N (1993). C R Acad Sci Paris Life Sci, 316: 1194-1199], while in the case of the “floral dip” method the developing floral tissue is incubated briefly with a surfactant-treated agrobacterial suspension [Clough, S J and Bent A F (1998) The Plant J. 16, 735-743]. A certain proportion of transgenic seeds are harvested in both cases, and these seeds can be distinguished from non-transgenic seeds by growing under the above-described selective conditions. In addition the stable transformation of plastids is of advantages because plastids are inherited maternally is most crops reducing or eliminating the risk of transgene flow through pollen. The transformation of the chloroplast genome is generally achieved by a process which has been schematically displayed in Klaus et al., 2004 [Nature Biotechnology 22 (2), 225-229]. Briefly the sequences to be transformed are cloned together with a selectable marker gene between flanking sequences homologous to the chloroplast genome. These homologous flanking sequences direct site specific integration into the plastome. Plastidal transformation has been described for many different plant species and an overview is given in Bock (2001) Transgenic plastids in basic research and plant biotechnology. J Mol Biol. 2001 Sep. 21; 312 (3):425-38 or Maliga, P (2003) Progress towards commercialization of plastid transformation technology. Trends Biotechnol. 21, 20-28. Further biotechnological progress has recently been reported in form of marker free plastid transformants, which can be produced by a transient co-integrated maker gene (Klaus et al., 2004, Nature Biotechnology 22(2), 225-229).

### T-DNA Activation Taming

[0139] T-DNA activation tagging (Hayashi et al. Science (1992) 1350-1353), involves insertion of T-DNA, usually containing a promoter (may also be a translation enhancer or an intron), in the genomic region of the gene of interest or 10 kb up- or downstream of the coding region of a gene in a configuration such that the promoter directs expression of the targeted gene. Typically, regulation of expression of the targeted gene by its natural promoter is disrupted and the gene falls under the control of the newly introduced promoter. The promoter is typically embedded in a T-DNA. This T-DNA is randomly inserted into the plant genome, for example, through Agrobacterium infection and leads to modified expression of genes near the inserted T-DNA. The resulting transgenic plants show dominant phenotypes due to modified expression of genes close to the introduced promoter.

### Tilling

[0140] The term “TILLING” is an abbreviation of “Targeted Induced Local Lesions In Genomes” and refers to a mutagenesis technology useful to generate and/or identify nucleic acids encoding proteins with modified expression and/or activity. TILLING also allows selection of plants carrying such mutant variants. These mutant variants may exhibit modified expression, either in strength or in location or in timing (if the mutations affect the promoter for example). These mutant variants may exhibit higher activity than that exhibited by the gene in its natural form. TILLING combines high-density mutagenesis with high-throughput screening methods. The steps typically followed in TILLING are: (a) EMS mutagenesis (Redei G P and Koncz C (1992) In Methods in Arabidopsis Research, Koncz C, Chua N H, Schell J, eds. Singapore, World Scientific Publishing Co, pp. 16-82; Feldmann et al., (1994) In Meyerowitz E M, Somerville C R, eds, Arabidopsis. Cold Spring Harbor Laboratory Press, Cold Spring Harbor, N.Y., pp 137-172; Lightner J and Caspar T (1998) In J Martinez-Zapater, J Salinas, eds, Methods on Molecular Biology, Vol. 82. Humana Press, Totowa, N.J., pp 91-104); (b) DNA preparation and pooling of individuals; (c) PCR amplification of a region of interest; (d) denaturation and annealing to allow formation of heteroduplexes; (e) DHPLC, where the presence of a heteroduplex in a pool is detected as an extra peak in the chromatogram; (f) identification of the mutant individual; and (g) sequencing of the mutant PCR product. Methods for TILLING are well known in the art (McCallum et al., (2000) Nat Biotechnol 18: 455-457; reviewed by Stemple (2004) Nat Rev Genet 5(2): 145-50).

### Homologous Recombination

[0141] Homologous recombination allows introduction in a genome of a selected nucleic acid at a defined selected position. Homologous recombination is a standard technology used routinely in biological sciences for lower organisms such as yeast or the moss Physcomitrella. Methods for performing homologous recombination in plants have been described not only for model plants (Offringa et al. (1990) EMBO J 9(10): 3077-84) but also for crop plants, for example rice (Terada et al. (2002) Nat Biotech 20(10): 1030-4; Iida and Terada (2004) Curr Opin Biotech 15(2): 132-8), and approaches exist that are generally applicable regardless of the target organism (Miller et al, Nature Biotechnol. 25, 778-785, 2007).

### Yield

[0142] The term “yield” in general means a measurable produce of economic value, typically related to a specified crop, to an area, and to a period of time. Individual plant parts directly contribute to yield based on their number, size and/or weight, or the actual yield is the yield per square meter for a crop and year, which is determined by dividing total production (includes both harvested and appraised production) by planted square meters. The term “yield” of a plant may relate to vegetative biomass (root and/or shoot biomass), to reproductive organs, and/or to propagules (such as seeds) of that plant.

### Early Vigour

[0143] “Early vigour” refers to active healthy well-balanced growth especially during early stages of plant growth, and may result from increased plant fitness due to, for example, the plants being better adapted to their environment (i.e. optimizing the use of energy resources and partitioning between shoot and root). Plants having early vigour also show increased seedling survival and a better establishment of the crop, which often results in highly uniform fields (with the crop growing in uniform manner, i.e. with the majority of plants reaching the various stages of development at substantially the same time), and often better and higher yield. Therefore, early vigour may be determined by measuring various factors, such as thousand kernel weight, percentage germination, percentage emergence, seedling growth, seedling height, root length, root and shoot biomass and many more.

### Increase/Improve/Enhance

[0144] The terms “increase”, “improve” or “enhance” are interchangeable and shall mean in the sense of the application at least a 3%, 4%, 5%, 6%, 7%, 8%, 9% or 10%, preferably at least 15% or 20%, more preferably 25%, 30%, 35% or 40% more yield and/or growth in comparison to control plants as defined herein.

### Seed Yield

[0145] Increased seed yield may manifest itself as one or more of the following: a) an increase in seed biomass (total seed weight) which may be on an individual seed basis and/or per plant and/or per square meter; b) increased number of flowers per plant; c) increased number of (filled) seeds; d) increased seed filling rate (which is expressed as the ratio between the number of filled seeds divided by the total number of seeds); e) increased harvest index, which is expressed as a ratio of the yield of harvestable parts, such as seeds, divided by the total biomass; and f) increased thousand kernel weight (TKW), which is extrapolated from the number of filled seeds counted and their total weight. An increased TKW may result from an increased seed size and/or seed weight, and may also result from an increase in embryo and/or endosperm size.

[0146] An increase in seed yield may also be manifested as an increase in seed size and/or seed volume. Furthermore, an increase in seed yield may also manifest itself as an increase in seed area and/or seed length and/or seed width and/or seed perimeter. Increased yield may also result in modified architecture, or may occur because of modified architecture.

### Greenness Index

[0147] The “greenness index” as used herein is calculated from digital images of plants. For each pixel belonging to the plant object on the image, the ratio of the green value versus the red value (in the RGB model for encoding color) is calculated. The greenness index is expressed as the percentage of pixels for which the green-to-red ratio exceeds a given threshold. Under normal growth conditions, under salt stress growth conditions, and under reduced nutrient availability growth conditions, the greenness index of plants is measured in the last imaging before flowering. In contrast, under drought stress growth conditions, the greenness index of plants is measured in the first imaging after drought.

### Plant

[0148] The term “plant” as used herein encompasses whole plants, ancestors and progeny of the plants and plant parts, including seeds, shoots, stems, leaves, roots (including tubers), flowers, and tissues and organs, wherein each of the aforementioned comprise the gene/nucleic acid of interest. The term “plant” also encompasses plant cells, suspension cultures, callus tissue, embryos, meristematic regions, gametophytes, sporophytes, pollen and microspores, again wherein each of the aforementioned comprises the gene/nucleic acid of interest.

[0149] Plants that are particularly useful in the methods of the invention include all plants which belong to the superfamily Viridiplantae, in particular monocotyledonous and dicotyledonous plants including fodder or forage legumes, ornamental plants, food crops, trees or shrubs selected from the list comprising Acer spp., Actinidia spp., Abelmoschus spp., Agave sisalana, Agropyron spp., Agrostis stolonifera, Allium spp., Amaranthus spp., Ammophila arenaria, Ananas comosus, Annona spp., Apium graveolens, Arachis spp, Artocarpus spp., Asparagus officinalis, Avena spp. (e.g. Avena sativa, Avena fatua, Avena byzantina, Avena fatua var. sativa, Avena hybrida), Averrhoa carambola, Bambusa sp., Benincasa hispida, Bertholletia excelsea, Beta vulgaris, Brassica spp. (e.g. Brassica napus, Brassica rapa ssp. [canola, oilseed rape, turnip rape]), Cadaba farinosa, Camellia sinensis, Canna indica, Cannabis sativa, Capsicum spp., Carex elata, Carica papaya, Carissa macrocarpa, Carya spp., Carthamus tinctorius, Castanea spp., Ceiba pentandra, Cichorium endivia, Cinnamomum spp., Citrullus lanatus, Citrus spp., Cocos spp., Coffea spp., Colocasia esculenta, Cola spp., Corchorus sp., Coriandrum sativum, Corylus spp., Crataegus spp., Crocus sativus, Cucurbita spp., Cucumis spp., Cynara spp., Daucus carota, Desmodium spp., Dimocarpus longan, Dioscorea spp., Diospyros spp., Echinochloa spp., Elaeis (e.g. Elaeis guineensis, Elaeis oleifera), Eleusine coracana, Eragrostis tef, Erianthus sp., Eriobotrya japonica, Eucalyptus sp., Eugenia uniflora, Fagopyrum spp., Fagus spp., Festuca arundinacea, Ficus carica, Fortunella spp., Fragaria spp., Ginkgo biloba, Glycine spp. (e.g. Glycine max, Soja hispida or Soja max), Gossypium hirsutum, Helianthus spp. (e.g. Helianthus annuus), Hemerocallis fulva, Hibiscus spp., Hordeum spp. (e.g. Hordeum vulgare), Ipomoea batatas, Juglans spp., Lactuca sativa, Lathyrus spp., Lens culinaris, Linum usitatissimum, Litchi chinensis, Lotus spp., Luffa acutangula, Lupinus spp., Luzula sylvatica, Lycopersicon spp. (e.g. Lycopersicon esculentum, Lycopersicon lycopersicum, Lycopersicon pyriforme), Macrotyloma spp., Malus spp., Malpighia emarginata, Mammea americana, Mangifera indica, Manihot spp., Manilkara zapota, Medicago sativa, Melilotus spp., Mentha spp., Miscanthus sinensis, Momordica spp., Morus nigra, Musa spp., Nicotiana spp., Olea spp., Opuntia spp., Omithopus spp., Oryza spp. (e.g. Oryza sativa, Oryza latifolia), Panicum miliaceum, Panicum virgatum, Passiflora edulis, Pastinaca sativa, Pennisetum sp., Persea spp., Petroselinum crispum, Phalaris arundinacea, Phaseolus spp., Phleum pratense, Phoenix spp., Phragmites australis, Physalis spp., Pinus spp., Pistacia vera, Pisum spp., Poa spp., Populus spp., Prosopis spp., Prunus spp., Psidium spp., Punica granatum, Pyrus communis, Quercus spp., Raphanus sativus, Rheum rhabarbarum, Ribes spp., Ricinus communis, Rubus spp., Saccharum spp., Salix sp., Sambucus spp., Secale cereale, Sesamum spp., Sinapis sp., Solanum spp. (e.g. Solanum tuberosum, Solanum integrifolium or Solanum lycopersicum), Sorghum bicolor, Spinacia spp., Syzygium spp., Tagetes spp., Tamarindus indica, Theobroma cacao, Trifolium spp., Tripsacum dactyloides, Triticosecale rimpaui, Triticum spp. (e.g. Triticum aestivum, Triticum durum, Triticum turgidum, Triticum hybernum, Triticum macha, Triticum sativum, Triticum monococcum or Triticum vulgare), Tropaeolum minus, Tropaeolum majus, Vaccinium spp., Vicia spp., Vigna spp., Viola odorata, Vitis spp., Zea mays, Zizania palustris, Ziziphus spp., amongst others.

### DETAILED DESCRIPTION OF THE INVENTION

### I. LOB-Domain Comprising Protein (LOB: Lateral Organ Boundaries)

[0150] Surprisingly, it has now been found that modulating expression in a plant of a nucleic acid encoding a LBD polypeptide gives plants having enhanced yield-related traits relative to control plants. According to a first embodiment, the present invention provides a method for enhancing yield-related traits in plants relative to control plants, comprising modulating expression in a plant of a nucleic acid encoding a LBD polypeptide.

[0151] A preferred method for modulating (preferably, increasing) expression of a nucleic acid encoding a LBD polypeptide is by introducing and expressing in a plant a nucleic acid encoding a LBD polypeptide.

[0152] Any reference hereinafter to a “protein useful in the methods of the invention” is taken to mean a LBD polypeptide as defined herein. Any reference hereinafter to a “nucleic acid useful in the methods of the invention” is taken to mean a nucleic acid capable of encoding such a LBD polypeptide. The nucleic acid to be introduced into a plant (and therefore useful in performing the methods of the invention) is any nucleic acid encoding the type of protein which will now be described, hereafter also named “LBD nucleic acid” or “LBD gene”.

[0153] A “LBD polypeptide” as defined herein refers to any polypeptide comprising a DUF260 domain (Pfam accession number PF03195, Interpro accession number IPR004883, see FIG. 1). Preferably, the LBD polypeptide sequence, when used in the construction of a phylogenetic tree such as the one depicted in FIG. 3 (or as defined by Yang et al., 2006, using the HKY method (Hasegawa et al., J. Mol. Evol. 22, 160-174, 1985)), clusters with the group of class II LOB domain polypeptides comprising the amino acid sequence represented by SEQ ID NO: 2 rather than with any other group.

[0154] Further preferably, the LBD protein comprises at least one of the following conserved motifs:

Motif 1: MSCNGCRXLRKGCX (SEQ ID NO: 5); wherein X on position 8 may be any amino acid, but preferably V or I and wherein X on position 14 may be any amino acid, but preferably is one of S, G or N.
Motif 2: QXXATXFXAKFXGR (SEQ ID NO: 6), wherein X on position 2 may be any amino acid, but preferably one of A, S, or G; wherein X on position 3 may be any amino acid, but preferably one of N, Q, or H; wherein X on position 6 may be any amino acid, but preferably one of V, L, or I; wherein X on position 8 may be any amino acid, but preferably one of L, V, A, or I; and wherein X on position 12 may be any amino acid, but preferably one of Y or F.
Motif 3: FXSLLXEAXG (SEQ ID NO: 7); wherein X on position 2 may be any amino acid, but preferably one of R, S, K, or Q; wherein X on position 6 may be any amino acid, but preferably one of Y, H, or F; and wherein X on position 9 may be any amino acid, but preferably C or A.

[0155] Further preferably, the LBD protein comprises more than seven, more preferably at least nine Cys residues, and does not comprise the DP(V/I)YG signature (SEQ ID NO: 8).

[0156] The DUF260 domain is characterised by the presence of a C-x(2)-C-x(6)-C-x(3)-C motif (SEQ ID NO: 9), wherein X may be any amino acid.

[0157] The term “domain” and “motif” is defined in the “definitions” section herein. Specialist databases exist for the identification of domains, for example, SMART (Schultz et al. (1998) Proc. Natl. Acad. Sci. USA 95, 5857-5864; Letunic et al. (2002) Nucleic Acids Res 30, 242-244, InterPro (Mulder et al., (2003) Nucl. Acids. Res. 31, 315-318, Prosite (Bucher and Bairoch (1994), A generalized profile syntax for biomolecular sequences motifs and its function in automatic sequence interpretation. (In) ISMB-94; Proceedings 2nd International Conference on Intelligent Systems for Molecular Biology. Altman R., Brutlag D., Karp P., Lathrop R., Searls D., Eds., pp53-61, AAAI Press, Menlo Park; Hulo et al., Nucl. Acids. Res. 32:D134-D137, (2004), or Pfam (Bateman et al., Nucleic Acids Research 30(1): 276-280 (2002). A set of tools for in silico analysis of protein sequences is available on the ExPASy proteomics server (Swiss Institute of Bioinformatics (Gasteiger et al., ExPASy: the proteomics server for in-depth protein knowledge and analysis, Nucleic Acids Res. 31:3784-3788(2003)). Domains may also be identified using routine techniques, such as by sequence alignment.

[0158] Methods for the alignment of sequences for comparison are well known in the art, such methods include GAP, BESTFIT, BLAST, FASTA and TFASTA. GAP uses the algorithm of Needleman and Wunsch ((1970) J Mol Biol 48: 443-453) to find the global (i.e. spanning the complete sequences) alignment of two sequences that maximizes the number of matches and minimizes the number of gaps. The BLAST algorithm (Altschul et al. (1990) J Mol Biol 215: 403-10) calculates percent sequence identity and performs a statistical analysis of the similarity between the two sequences. The software for performing BLAST analysis is publicly available through the National Centre for Biotechnology Information (NCBI). Homologues may readily be identified using, for example, the ClustalW multiple sequence alignment algorithm (version 1.83), with the default pairwise alignment parameters, and a scoring method in percentage. Global percentages of similarity and identity may also be determined using one of the methods available in the MatGAT software package (Campanella et al., BMC Bioinformatics. 2003 Jul. 10; 4:29. MatGAT: an application that generates similarity/identity matrices using protein or DNA sequences). Minor manual editing may be performed to optimise alignment between conserved motifs, as would be apparent to a person skilled in the art. Furthermore, instead of using full-length sequences for the identification of homologues, specific domains may also be used. The sequence identity values may be determined over the entire nucleic acid or amino acid sequence or over selected domains or conserved motif(s), using the programs mentioned above using the default parameters.

[0159] Furthermore, LBD polypeptides (at least in their native form), as transcription factors, typically have DNA binding activity. Tools and techniques for measuring DNA binding activity are well known in the art and include for example gel retardation assays. Experimental approaches for characterising activity of transcription factors may be found for example in Sambrook et al. (2001) Molecular Cloning: a laboratory manual, 3rd Edition Cold Spring Harbor Laboratory Press, CSH, New York, or in Volumes 1 and 2 of Ausubel et al. (yearly updated), Current Protocols in Molecular Biology, Current Protocols.

[0160] The present invention is illustrated by transforming plants with the nucleic acid sequence represented by SEQ ID NO: 1, encoding the polypeptide sequence of SEQ ID NO: 2. However, performance of the invention is not restricted to these sequences; the methods of the invention may advantageously be performed using any LBD-encoding nucleic acid or LBD polypeptide as defined herein.

[0161] Examples of nucleic acids encoding LBD polypeptides are given in Table A1 of Example 1 herein. Such nucleic acids are useful in performing the methods of the invention. The amino acid sequences given in Table A1 of Example 1 are example sequences of orthologues and paralogues of the LBD polypeptide represented by SEQ ID NO: 2, the terms “orthologues” and “paralogues” being as defined herein. Further orthologues and paralogues may readily be identified by performing a so-called reciprocal blast search. Typically, this involves a first BLAST involving BLASTing a query sequence (for example using any of the sequences listed in Table A1 of Example 1) against any sequence database, such as the publicly available NCBI database. BLASTN or TBLASTX (using standard default values) are generally used when starting from a nucleotide sequence, and BLASTP or TBLASTN (using standard default values) when starting from a protein sequence. The BLAST results may optionally be filtered. The full-length sequences of either the filtered results or non-filtered results are then BLASTed back (second BLAST) against sequences from the organism from which the query sequence is derived (where the query sequence is SEQ ID NO: 1 or SEQ ID NO: 2, the second BLAST would therefore be against Arabidopsis sequences). The results of the first and second BLASTs are then compared. A paralogue is identified if a high-ranking hit from the first blast is from the same species as from which the query sequence is derived, a BLAST back then ideally results in the query sequence amongst the highest hits; an orthologue is identified if a high-ranking hit in the first BLAST is not from the same species as from which the query sequence is derived, and preferably results upon BLAST back in the query sequence being among the highest hits.

[0162] High-ranking hits are those having a low E-value. The lower the E-value, the more significant the score (or in other words the lower the chance that the hit was found by chance). Computation of the E-value is well known in the art. In addition to E-values, comparisons are also scored by percentage identity. Percentage identity refers to the number of identical nucleotides (or amino acids) between the two compared nucleic acid (or polypeptide) sequences over a particular length. In the case of large families, ClustalW may be used, followed by a neighbour joining tree, to help visualize clustering of related genes and to identify orthologues and paralogues.

[0163] Nucleic acid variants may also be useful in practising the methods of the invention. Examples of such variants include nucleic acids encoding homologues and derivatives of any one of the amino acid sequences given in Table A1 of Example 1, the terms “homologue” and “derivative” being as defined herein. Also useful in the methods of the invention are nucleic acids encoding homologues and derivatives of orthologues or paralogues of any one of the amino acid sequences given in Table A1 of Example 1. Homologues and derivatives useful in the methods of the present invention have substantially the same biological and functional activity as the unmodified protein from which they are derived.

[0164] Further nucleic acid variants useful in practising the methods of the invention include portions of nucleic acids encoding LBD polypeptides, nucleic acids hybridising to nucleic acids encoding LBD polypeptides, splice variants of nucleic acids encoding LBD polypeptides, allelic variants of nucleic acids encoding LBD polypeptides and variants of nucleic acids encoding LBD polypeptides obtained by gene shuffling. The terms hybridising sequence, splice variant, allelic variant and gene shuffling are as described herein.

[0165] Advantageously, the present invention provides hitherto unknown LBD nucleic acid and polypeptide sequences.

[0166] According to a further embodiment of the present invention, there is provided an isolated nucleic acid molecule comprising:
[0167] (i) a nucleic acid represented by SEQ ID NO: 69;
[0168] (ii) a nucleic acid or fragment thereof that is complementary to any one of the SEQ ID NOs given in (i);
[0169] (iii) a nucleic acid encoding a LBD polypeptide having, in increasing order of preference, at least 60%, 65%, 70%, 75%, 80%, 85%, 90%, 95%, 96%, 97%, 98%, 99% or more sequence identity to SEQ ID NO: 70;
[0170] (iv) a nucleic acid capable of hybridizing under stringent conditions to any one of the nucleic acids given in (i), (ii) or (iii) above.

[0171] According to a further embodiment of the present invention, there is therefore provided an isolated polypeptide comprising:
[0172] (i) an amino acid sequence having, in increasing order of preference, at least 60%, 65%, 70%, 75%, 80%, 85%, 90%, 95%, 96%, 97%, 98%, 99% or 100% sequence identity to the amino acid sequence given in SEQ ID NO: 70.
[0173] (ii) derivatives of any of the amino acid sequences given in (i).

[0174] Nucleic acids encoding LBD polypeptides need not be full-length nucleic acids, since performance of the methods of the invention does not rely on the use of full-length nucleic acid sequences. According to the present invention, there is provided a method for enhancing yield-related traits in plants, comprising introducing and expressing in a plant a portion of any one of the nucleic acid sequences given in Table A1 of Example 1, or a portion of a nucleic acid encoding an orthologue, paralogue or homologue of any of the amino acid sequences given in Table A1 of Example 1.

[0175] A portion of a nucleic acid may be prepared, for example, by making one or more deletions to the nucleic acid. The portions may be used in isolated form or they may be fused to other coding (or non-coding) sequences in order to, for example, produce a protein that combines several activities. When fused to other coding sequences, the resultant polypeptide produced upon translation may be bigger than that predicted for the protein portion.

[0176] Portions useful in the methods of the invention, encode a LBD polypeptide as defined herein, and have substantially the same biological activity as the amino acid sequences given in Table A1 of Example 1. Preferably, the portion is a portion of any one of the nucleic acids given in Table A1 of Example 1, or is a portion of a nucleic acid encoding an orthologue or paralogue of any one of the amino acid sequences given in Table A1 of Example 1. Preferably the portion is at least 500, 550, 600, 650, 700, 750, 800, 850, 900, 950, 1000 consecutive nucleotides in length, the consecutive nucleotides being of any one of the nucleic acid sequences given in Table A1 of Example 1, or of a nucleic acid encoding an orthologue or paralogue of any one of the amino acid sequences given in Table A1 of Example 1. Most preferably the portion is a portion of the nucleic acid of SEQ ID NO: 1. Preferably, the portion encodes an amino acid sequence which when used in the construction of a phylogenetic tree such as the one depicted in FIG. 3 (or as defined by Yang et al., 2006, using the HKY method (Hasegawa et al., J. Mol. Evol. 22, 160-174, 1985)), clusters with the group of class II LOB domain polypeptides comprising the amino acid sequence represented by SEQ ID NO: 2 rather than with any other group.

[0177] Another nucleic acid variant useful in the methods of the invention is a nucleic acid capable of hybridising, under reduced stringency conditions, preferably under stringent conditions, with a nucleic acid encoding a LBD polypeptide as defined herein, or with a portion as defined herein.

[0178] According to the present invention, there is provided a method for enhancing yield-related traits in plants, comprising introducing and expressing in a plant a nucleic acid capable of hybridizing to any one of the nucleic acids given in Table A1 of Example 1, or comprising introducing and expressing in a plant a nucleic acid capable of hybridising to a nucleic acid encoding an orthologue, paralogue or homologue of any of the nucleic acid sequences given in Table A1 of Example 1.

[0179] Hybridising sequences useful in the methods of the invention encode a LBD polypeptide as defined herein, and have substantially the same biological activity as the amino acid sequences given in Table A1 of Example 1. Preferably, the hybridising sequence is capable of hybridising to any one of the nucleic acids given in Table A1 of Example 1, or to a portion of any of these sequences, a portion being as defined above, or wherein the hybridising sequence is capable of hybridising to a nucleic acid encoding an orthologue or paralogue of any one of the amino acid sequences given in Table A1 of Example 1. Most preferably, the hybridising sequence is capable of hybridising to a nucleic acid as represented by SEQ ID NO: 1 or to a portion thereof.

[0180] Preferably, the hybridising sequence encodes an amino acid sequence which when used in the construction of a phylogenetic tree such as the one depicted in FIG. 3 (or as defined by Yang et al., 2006, using the HKY method (Hasegawa et al., J. Mol. Evol. 22, 160-174, 1985)), clusters with the group of class II LOB domain polypeptides comprising the amino acid sequence represented by SEQ ID NO: 2 rather than with any other group.

[0181] Another nucleic acid variant useful in the methods of the invention is a splice variant encoding a LBD polypeptide as defined hereinabove, a splice variant being as defined herein.

[0182] According to the present invention, there is provided a method for enhancing yield-related traits in plants, comprising introducing and expressing in a plant a splice variant of any one of the nucleic acid sequences given in Table A1 of Example 1, or a splice variant of a nucleic acid encoding an orthologue, paralogue or homologue of any of the amino acid sequences given in Table A1 of Example 1.

[0183] Preferred splice variants are splice variants of a nucleic acid represented by SEQ ID NO: 1, or a splice variant of a nucleic acid encoding an orthologue or paralogue of SEQ ID NO: 2. Preferably, the amino acid sequence encoded by the splice variant, when used in the construction of a phylogenetic tree such as the one depicted in FIG. 3 (or as defined by Yang et al., 2006, using the HKY method (Hasegawa et al., J. Mol. Evol. 22, 160-174, 1985)), clusters with the group of class II LOB domain polypeptides comprising the amino acid sequence represented by SEQ ID NO: 2 rather than with any other group.

[0184] Another nucleic acid variant useful in performing the methods of the invention is an allelic variant of a nucleic acid encoding a LBD polypeptide as defined hereinabove, an allelic variant being as defined herein.

[0185] According to the present invention, there is provided a method for enhancing yield-related traits in plants, comprising introducing and expressing in a plant an allelic variant of any one of the nucleic acids given in Table A1 of Example 1, or comprising introducing and expressing in a plant an allelic variant of a nucleic acid encoding an orthologue, paralogue or homologue of any of the amino acid sequences given in Table A1 of Example 1.

[0186] The allelic variants useful in the methods of the present invention have substantially the same biological activity as the LBD polypeptide of SEQ ID NO: 2 and any of the amino acids depicted in Table A1 of Example 1. Allelic variants exist in nature, and encompassed within the methods of the present invention is the use of these natural alleles. Preferably, the allelic variant is an allelic variant of SEQ ID NO: 1 or an allelic variant of a nucleic acid encoding an orthologue or paralogue of SEQ ID NO: 2. Preferably, the amino acid sequence encoded by the allelic variant, when used in the construction of a phylogenetic tree such as the one depicted in FIG. 3 (or as defined by Yang et al., 2006, using the HKY method (Hasegawa et al., J. Mol. Evol. 22, 160-174, 1985)), clusters with the group of class II LOB domain polypeptides comprising the amino acid sequence represented by SEQ ID NO: 2 rather than with any other group.

[0187] Gene shuffling or directed evolution may also be used to generate variants of nucleic acids encoding LBD polypeptides as defined above; the term “gene shuffling” being as defined herein.

[0188] According to the present invention, there is provided a method for enhancing yield-related traits in plants, comprising introducing and expressing in a plant a variant of any one of the nucleic acid sequences given in Table A1 of Example 1, or comprising introducing and expressing in a plant a variant of a nucleic acid encoding an orthologue, paralogue or homologue of any of the amino acid sequences given in Table A1 of Example 1, which variant nucleic acid is obtained by gene shuffling.

[0189] Preferably, the amino acid sequence encoded by the variant nucleic acid obtained by gene shuffling, when used in the construction of a phylogenetic tree such as the one depicted in FIG. 3 (or as defined by Yang et al., 2006, using the HKY method (Hasegawa et al., J. Mol. Evol. 22, 160-174, 1985)), clusters with the group of class II LOB domain polypeptides comprising the amino acid sequence represented by SEQ ID NO: 2 rather than with any other group.

[0190] Furthermore, nucleic acid variants may also be obtained by site-directed mutagenesis. Several methods are available to achieve site-directed mutagenesis, the most common being PCR based methods (Current Protocols in Molecular Biology. Wiley Eds.).

[0191] Nucleic acids encoding LBD polypeptides may be derived from any natural or artificial source. The nucleic acid may be modified from its native form in composition and/or genomic environment through deliberate human manipulation. Preferably the LBD polypeptide-encoding nucleic acid is from a plant, further preferably from a dicotyledonous plant, more preferably from the family Brassicaceae, most preferably the nucleic acid is from Arabidopsis thaliana.

[0192] Performance of the methods of the invention gives plants having enhanced yield-related traits. In particular performance of the methods of the invention gives plants having increased yield, especially increased seed yield relative to control plants. The terms “yield” and “seed yield” are described in more detail in the “definitions” section herein.

[0193] Reference herein to enhanced yield-related traits is taken to mean an increase in biomass (weight) of one or more parts of a plant, which may include aboveground (harvestable) parts and/or (harvestable) parts below ground. In particular, such aboveground harvestable parts are shoot biomass and seeds, and performance of the methods of the invention results in plants having increased shoot biomass and seed yield relative to the shoot biomass and seed yield of control plants.

[0194] Taking corn as an example, a yield increase may be manifested as one or more of the following: increase in the number of plants established per hectare or acre, an increase in the number of ears per plant, an increase in the number of rows, number of kernels per row, kernel weight, thousand kernel weight, ear length/diameter, increase in the seed filling rate (which is the number of filled seeds divided by the total number of seeds and multiplied by 100), among others. Taking rice as an example, a yield increase may manifest itself as an increase in one or more of the following: number of plants per hectare or acre, number of panicles per plant, number of spikelets per panicle, number of flowers (florets) per panicle (which is expressed as a ratio of the number of filled seeds over the number of primary panicles), increase in the seed filling rate (which is the number of filled seeds divided by the total number of seeds and multiplied by 100), increase in thousand kernel weight, among others.

[0195] The present invention provides a method for increasing yield, especially shoot biomass yield and seed yield of plants, relative to control plants, which method comprises modulating expression, preferably increasing expression, in a plant of a nucleic acid encoding a LBD polypeptide as defined herein.

[0196] Since the transgenic plants according to the present invention have increased yield, it is likely that these plants exhibit an increased growth rate (during at least part of their life cycle), relative to the growth rate of control plants at a corresponding stage in their life cycle.

[0197] The increased growth rate may be specific to one or more parts of a plant (including seeds), or may be throughout substantially the whole plant. Plants having an increased growth rate may have a shorter life cycle. The life cycle of a plant may be taken to mean the time needed to grow from a dry mature seed up to the stage where the plant has produced dry mature seeds, similar to the starting material. This life cycle may be influenced by factors such as early vigour, growth rate, greenness index, flowering time and speed of seed maturation. The increase in growth rate may take place at one or more stages in the life cycle of a plant or during substantially the whole plant life cycle. Increased growth rate during the early stages in the life cycle of a plant may reflect enhanced vigour. The increase in growth rate may alter the harvest cycle of a plant allowing plants to be sown later and/or harvested sooner than would otherwise be possible (a similar effect may be obtained with earlier flowering time). If the growth rate is sufficiently increased, it may allow for the further sowing of seeds of the same plant species (for example sowing and harvesting of rice plants followed by sowing and harvesting of further rice plants all within one conventional growing period). Similarly, if the growth rate is sufficiently increased, it may allow for the further sowing of seeds of different plants species (for example the sowing and harvesting of corn plants followed by, for example, the sowing and optional harvesting of soybean, potato or any other suitable plant). Harvesting additional times from the same rootstock in the case of some crop plants may also be possible. Altering the harvest cycle of a plant may lead to an increase in annual biomass production per acre (due to an increase in the number of times (say in a year) that any particular plant may be grown and harvested). An increase in growth rate may also allow for the cultivation of transgenic plants in a wider geographical area than their wild-type counterparts, since the territorial limitations for growing a crop are often determined by adverse environmental conditions either at the time of planting (early season) or at the time of harvesting (late season). Such adverse conditions may be avoided if the harvest cycle is shortened. The growth rate may be determined by deriving various parameters from growth curves, such parameters may be: T-Mid (the time taken for plants to reach 50% of their maximal size) and T-90 (time taken for plants to reach 90% of their maximal size), amongst others.

[0198] According to a preferred feature of the present invention, performance of the methods of the invention gives plants having an increased growth rate relative to control plants. Therefore, according to the present invention, there is provided a method for increasing the growth rate of plants, which method comprises modulating expression, preferably increasing expression, in a plant of a nucleic acid encoding a LBD polypeptide as defined herein. In particular, an increase in growth rate was observed during the early growth stages of the plant (early vigour).

[0199] An increase in yield and/or growth rate occurs whether the plant is under non-stress conditions or whether the plant is exposed to various stresses compared to control plants. Plants typically respond to exposure to stress by growing more slowly. In conditions of severe stress, the plant may even stop growing altogether. Mild stress on the other hand is defined herein as being any stress to which a plant is exposed which does not result in the plant ceasing to grow altogether without the capacity to resume growth. Mild stress in the sense of the invention leads to a reduction in the growth of the stressed plants of less than 40%, 35% or 30%, preferably less than 25%, 20% or 15%, more preferably less than 14%, 13%, 12%, 11% or 10% or less in comparison to the control plant under non-stress conditions. Due to advances in agricultural practices (irrigation, fertilization, pesticide treatments) severe stresses are not often encountered in cultivated crop plants. As a consequence, the compromised growth induced by mild stress is often an undesirable feature for agriculture. Mild stresses are the everyday biotic and/or abiotic (environmental) stresses to which a plant is exposed. Abiotic stresses may be due to drought or excess water, anaerobic stress, salt stress, chemical toxicity, oxidative stress and hot, cold or freezing temperatures. The abiotic stress may be an osmotic stress caused by a water stress (particularly due to drought), salt stress, oxidative stress or an ionic stress. Biotic stresses are typically those stresses caused by pathogens, such as bacteria, viruses, fungi and insects.

[0200] In particular, the methods of the present invention may be performed under non-stress conditions or under conditions of mild drought to give plants having increased yield relative to control plants. As reported in Wang et al. (Planta (2003) 218: 1-14), abiotic stress leads to a series of morphological, physiological, biochemical and molecular changes that adversely affect plant growth and productivity. Drought, salinity, extreme temperatures and oxidative stress are known to be interconnected and may induce growth and cellular damage through similar mechanisms. Rabbani et al. (Plant Physiol (2003) 133: 1755-1767) describes a particularly high degree of “cross talk” between drought stress and high-salinity stress. For example, drought and/or salinisation are manifested primarily as osmotic stress, resulting in the disruption of homeostasis and ion distribution in the cell. Oxidative stress, which frequently accompanies high or low temperature, salinity or drought stress, may cause denaturing of functional and structural proteins. As a consequence, these diverse environmental stresses often activate similar cell signalling pathways and cellular responses, such as the production of stress proteins, up-regulation of anti-oxidants, accumulation of compatible solutes and growth arrest. The term “non-stress” conditions as used herein are those environmental conditions that allow optimal growth of plants. Persons skilled in the art are aware of normal soil conditions and climatic conditions for a given location. Plants with optimal growth conditions, (grown under non-stress conditions) typically yield in increasing order of preference at least 90%, 87%, 85%, 83%, 80%, 77% or 75% of the average production of such plant in a given environment. Average production may be calculated on harvest and/or season basis. Persons skilled in the art are aware of average yield productions of a crop.

[0201] Performance of the methods of the invention gives plants grown under non-stress conditions or under mild drought conditions increased yield relative to control plants grown under comparable conditions. Therefore, according to the present invention, there is provided a method for increasing yield in plants grown under non-stress conditions or under mild drought conditions, which method comprises increasing expression in a plant of a nucleic acid encoding a LBD polypeptide.

[0202] Performance of the methods of the invention gives plants grown under conditions of nutrient deficiency, particularly under conditions of nitrogen deficiency, increased early vigour and increased yield relative to control plants grown under comparable conditions. Therefore, according to the present invention, there is provided a method for increasing early vigour and yield in plants grown under conditions of nutrient deficiency, which method comprises increasing expression in a plant of a nucleic acid encoding a LBD polypeptide. Nutrient deficiency may result from a lack or excess of nutrients such as nitrogen, phosphates and other phosphorous-containing compounds, potassium, calcium, cadmium, magnesium, manganese, iron and boron, amongst others.

[0203] The present invention encompasses plants or parts thereof (including seeds) obtainable by the methods according to the present invention. The plants or parts thereof comprise a nucleic acid transgene encoding a LBD polypeptide as defined above.

[0204] The invention also provides genetic constructs and vectors to facilitate introduction and/or expression in plants of nucleic acids encoding LBD polypeptides. The gene constructs may be inserted into vectors, which may be commercially available, suitable for transforming into plants and suitable for expression of the gene of interest in the transformed cells. The invention also provides use of a gene construct as defined herein in the methods of the invention.

[0205] More specifically, the present invention provides a construct comprising:
[0206] (a) a nucleic acid encoding a LBD polypeptide as defined above;
[0207] (b) one or more control sequences capable of driving expression of the nucleic acid sequence of (a); and optionally
[0208] (c) a transcription termination sequence.

[0209] Preferably, the nucleic acid encoding a LBD polypeptide is as defined above. The term “control sequence” and “termination sequence” are as defined herein.

[0210] Plants are transformed with a vector comprising any of the nucleic acids described above. The skilled artisan is well aware of the genetic elements that must be present on the vector in order to successfully transform, select and propagate host cells containing the sequence of interest. The sequence of interest is operably linked to one or more control sequences (at least to a promoter).

[0211] Advantageously, any type of promoter, whether natural or synthetic, may be used to drive expression of the nucleic acid sequence. A constitutive promoter is particularly useful in the methods. See the “Definitions” section herein for definitions of the various promoter types.

[0212] It should be clear that the applicability of the present invention is not restricted to the LBD polypeptide-encoding nucleic acid represented by SEQ ID NO: 1, nor is the applicability of the invention restricted to expression of a LBD polypeptide-encoding nucleic acid when driven by a constitutive promoter.

[0213] The constitutive promoter is preferably a GOS2 promoter, preferably a GOS2 promoter from rice. Further preferably the constitutive promoter is represented by a nucleic acid sequence substantially similar to SEQ ID NO: 10, most preferably the constitutive promoter is as represented by SEQ ID NO: 10. See the “Definitions” section herein for further examples of constitutive promoters.

[0214] Optionally, one or more terminator sequences may be used in the construct introduced into a plant. Additional regulatory elements may include transcriptional as well as translational enhancers. Those skilled in the art will be aware of terminator and enhancer sequences that may be suitable for use in performing the invention. An intron sequence may also be added to the 5′ untranslated region (UTR) or in the coding sequence to increase the amount of the mature message that accumulates in the cytosol, as described in the definitions section. Other control sequences (besides promoter, enhancer, silencer, intron sequences, 3′UTR and/or 5′UTR regions) may be protein and/or RNA stabilizing elements. Such sequences would be known or may readily be obtained by a person skilled in the art.

[0215] The genetic constructs of the invention may further include an origin of replication sequence that is required for maintenance and/or replication in a specific cell type. One example is when a genetic construct is required to be maintained in a bacterial cell as an episomal genetic element (e.g. plasmid or cosmid molecule). Preferred origins of replication include, but are not limited to, the f1-ori and colE1.

[0216] For the detection of the successful transfer of the nucleic acid sequences as used in the methods of the invention and/or selection of transgenic plants comprising these nucleic acids, it is advantageous to use marker genes (or reporter genes). Therefore, the genetic construct may optionally comprise a selectable marker gene. Selectable markers are described in more detail in the “definitions” section herein.

[0217] It is known that upon stable or transient integration of nucleic acids into plant cells, only a minority of the cells takes up the foreign DNA and, if desired, integrates it into its genome, depending on the expression vector used and the transfection technique used. To identify and select these integrants, a gene coding for a selectable marker (such as the ones described above) is usually introduced into the host cells together with the gene of interest. These markers can for example be used in mutants in which these genes are not functional by, for example, deletion by conventional methods. Furthermore, nucleic acid molecules encoding a selectable marker can be introduced into a host cell on the same vector that comprises the sequence encoding the polypeptides of the invention or used in the methods of the invention, or else in a separate vector. Cells which have been stably transfected with the introduced nucleic acid can be identified for example by selection (for example, cells which have integrated the selectable marker survive whereas the other cells die). The marker genes may be removed or excised from the transgenic cell once they are no longer needed. Techniques for marker gene removal are known in the art, useful techniques are described above in the definitions section.

[0218] The invention also provides a method for the production of transgenic plants having enhanced yield-related traits relative to control plants, comprising introduction and expression in a plant of any nucleic acid encoding a LBD polypeptide as defined hereinabove.

[0219] More specifically, the present invention provides a method for the production of transgenic plants having increased enhanced yield-related traits, particularly increased shoot biomass and increased seed yield, which method comprises:
[0220] (i) introducing and expressing in a plant or plant cell a LBD polypeptide-encoding nucleic acid; and
[0221] (ii) cultivating the plant cell under conditions promoting plant growth and development.

[0222] The nucleic acid of (i) may be any of the nucleic acids capable of encoding a LBD polypeptide as defined herein.

[0223] The nucleic acid may be introduced directly into a plant cell or into the plant itself (including introduction into a tissue, organ or any other part of a plant). According to a preferred feature of the present invention, the nucleic acid is preferably introduced into a plant by transformation. The term “transformation” is described in more detail in the “definitions” section herein.

[0224] The genetically modified plant cells can be regenerated via all methods with which the skilled worker is familiar. Suitable methods can be found in the abovementioned publications by S. D. Kung and R. Wu, Potrykus or Hofgen and Willmitzer.

[0225] Generally after transformation, plant cells or cell groupings are selected for the presence of one or more markers which are encoded by plant-expressible genes co-transferred with the gene of interest, following which the transformed material is regenerated into a whole plant. To select transformed plants, the plant material obtained in the transformation is, as a rule, subjected to selective conditions so that transformed plants can be distinguished from untransformed plants. For example, the seeds obtained in the above-described manner can be planted and, after an initial growing period, subjected to a suitable selection by spraying. A further possibility consists in growing the seeds, if appropriate after sterilization, on agar plates using a suitable selection agent so that only the transformed seeds can grow into plants. Alternatively, the transformed plants are screened for the presence of a selectable marker such as the ones described above.

[0226] Following DNA transfer and regeneration, putatively transformed plants may also be evaluated, for instance using Southern analysis, for the presence of the gene of interest, copy number and/or genomic organisation. Alternatively or additionally, expression levels of the newly introduced DNA may be monitored using Northern and/or Western analysis, both techniques being well known to persons having ordinary skill in the art.

[0227] The generated transformed plants may be propagated by a variety of means, such as by clonal propagation or classical breeding techniques. For example, a first generation (or T1) transformed plant may be selfed and homozygous second-generation (or T2) transformants selected, and the T2 plants may then further be propagated through classical breeding techniques. The generated transformed organisms may take a variety of forms. For example, they may be chimeras of transformed cells and non-transformed cells; clonal transformants (e.g., all cells transformed to contain the expression cassette); grafts of transformed and untransformed tissues (e.g., in plants, a transformed rootstock grafted to an untransformed scion).

[0228] The present invention clearly extends to any plant cell or plant produced by any of the methods described herein, and to all plant parts and propagules thereof. The present invention extends further to encompass the progeny of a primary transformed or transfected cell, tissue, organ or whole plant that has been produced by any of the aforementioned methods, the only requirement being that progeny exhibit the same genotypic and/or phenotypic characteristic(s) as those produced by the parent in the methods according to the invention.

[0229] The invention also includes host cells containing an isolated nucleic acid encoding a LBD polypeptide as defined hereinabove. Preferred host cells according to the invention are plant cells. Host plants for the nucleic acids or the vector used in the method according to the invention, the expression cassette or construct or vector are, in principle, advantageously all plants, which are capable of synthesizing the polypeptides used in the inventive method.

[0230] The methods of the invention are advantageously applicable to any plant. Plants that are particularly useful in the methods of the invention include all plants which belong to the superfamily Viridiplantae, in particular monocotyledonous and dicotyledonous plants including fodder or forage legumes, ornamental plants, food crops, trees or shrubs. According to a preferred embodiment of the present invention, the plant is a crop plant. Examples of crop plants include soybean, sunflower, canola, alfalfa, rapeseed, cotton, tomato, potato and tobacco. Further preferably, the plant is a monocotyledonous plant. Examples of monocotyledonous plants include sugarcane. More preferably the plant is a cereal. Examples of cereals include rice, maize, wheat, barley, millet, rye, triticale, sorghum and oats.

[0231] The invention also extends to harvestable parts of a plant such as, but not limited to seeds, leaves, fruits, flowers, stems, rhizomes, tubers and bulbs. The invention furthermore relates to products derived, preferably directly derived, from a harvestable part of such a plant, such as dry pellets or powders, oil, fat and fatty acids, starch or proteins.

[0232] According to a preferred feature of the invention, the modulated expression is increased expression. Methods for increasing expression of nucleic acids or genes, or gene products, are well documented in the art and examples are provided in the definitions section.

[0233] As mentioned above, a preferred method for modulating (preferably, increasing) expression of a nucleic acid encoding a LBD polypeptide is by introducing and expressing in a plant a nucleic acid encoding a LBD polypeptide; however the effects of performing the method, i.e. enhancing yield-related traits may also be achieved using other well known techniques, including but not limited to T-DNA activation tagging, TILLING, homologous recombination. A description of these techniques is provided in the definitions section.

[0234] The present invention also encompasses use of nucleic acids encoding LBD polypeptides as described herein and use of these LBD polypeptides in enhancing any of the aforementioned yield-related traits in plants.

[0235] Nucleic acids encoding LBD polypeptide described herein, or the LBD polypeptides themselves, may find use in breeding programmes in which a DNA marker is identified which may be genetically linked to a LBD polypeptide-encoding gene. The nucleic acids/genes, or the LBD polypeptides themselves may be used to define a molecular marker. This DNA or protein marker may then be used in breeding programmes to select plants having enhanced yield-related traits as defined hereinabove in the methods of the invention.

[0236] Allelic variants of a LBD polypeptide-encoding nucleic acid/gene may also find use in marker-assisted breeding programmes. Such breeding programmes sometimes require introduction of allelic variation by mutagenic treatment of the plants, using for example EMS mutagenesis; alternatively, the programme may start with a collection of allelic variants of so called “natural” origin caused unintentionally. Identification of allelic variants then takes place, for example, by PCR. This is followed by a step for selection of superior allelic variants of the sequence in question and which give increased yield. Selection is typically carried out by monitoring growth performance of plants containing different allelic variants of the sequence in question. Growth performance may be monitored in a greenhouse or in the field. Further optional steps include crossing plants in which the superior allelic variant was identified with another plant. This could be used, for example, to make a combination of interesting phenotypic features.

[0237] Nucleic acids encoding LBD polypeptides may also be used as probes for genetically and physically mapping the genes that they are a part of, and as markers for traits linked to those genes. Such information may be useful in plant breeding in order to develop lines with desired phenotypes. Such use of LBD polypeptide-encoding nucleic acids requires only a nucleic acid sequence of at least 15 nucleotides in length. The LBD polypeptide-encoding nucleic acids may be used as restriction fragment length polymorphism (RFLP) markers. Southern blots (Sambrook J, Fritsch E F and Maniatis T (1989) Molecular Cloning, A Laboratory Manual) of restriction-digested plant genomic DNA may be probed with the LBD-encoding nucleic acids. The resulting banding patterns may then be subjected to genetic analyses using computer programs such as MapMaker (Lander et al. (1987) Genomics 1: 174-181) in order to construct a genetic map. In addition, the nucleic acids may be used to probe Southern blots containing restriction endonuclease-treated genomic DNAs of a set of individuals representing parent and progeny of a defined genetic cross. Segregation of the DNA polymorphisms is noted and used to calculate the position of the LBD polypeptide-encoding nucleic acid in the genetic map previously obtained using this population (Botstein et al. (1980) Am. J. Hum. Genet. 32:314-331).

[0238] The production and use of plant gene-derived probes for use in genetic mapping is described in Bernatzky and Tanksley (1986) Plant Mol. Biol. Reporter 4: 37-41. Numerous publications describe genetic mapping of specific cDNA clones using the methodology outlined above or variations thereof. For example, F2 intercross populations, backcross populations, randomly mated populations, near isogenic lines, and other sets of individuals may be used for mapping. Such methodologies are well known to those skilled in the art.

[0239] The nucleic acid probes may also be used for physical mapping (i.e., placement of sequences on physical maps; see Hoheisel et al. In: Non-mammalian Genomic Analysis: A Practical Guide, Academic press 1996, pp. 319-346, and references cited therein).

[0240] In another embodiment, the nucleic acid probes may be used in direct fluorescence in situ hybridisation (FISH) mapping (Trask (1991) Trends Genet. 7:149-154). Although current methods of FISH mapping favour use of large clones (several kb to several hundred kb; see Laan et al. (1995) Genome Res. 5:13-20), improvements in sensitivity may allow performance of FISH mapping using shorter probes.

[0241] A variety of nucleic acid amplification-based methods for genetic and physical mapping may be carried out using the nucleic acids. Examples include allele-specific amplification (Kazazian (1989) J. Lab. Clin. Med 11:95-96), polymorphism of PCR-amplified fragments (CAPS; Sheffield et al. (1993) Genomics 16:325-332), allele-specific ligation (Landegren et al. (1988) Science 241:1077-1080), nucleotide extension reactions (Sokolov (1990) Nucleic Acid Res. 18:3671), Radiation Hybrid Mapping (Walter et al. (1997) Nat. Genet. 7:22-28) and Happy Mapping (Dear and Cook (1989) Nucleic Acid Res. 17:6795-6807). For these methods, the sequence of a nucleic acid is used to design and produce primer pairs for use in the amplification reaction or in primer extension reactions. The design of such primers is well known to those skilled in the art. In methods employing PCR-based genetic mapping, it may be necessary to identify DNA sequence differences between the parents of the mapping cross in the region corresponding to the instant nucleic acid sequence. This, however, is generally not necessary for mapping methods.

[0242] The methods according to the present invention result in plants having enhanced yield-related traits, as described hereinbefore. These traits may also be combined with other economically advantageous traits, such as further yield-enhancing traits, tolerance to other abiotic and biotic stresses, traits modifying various architectural features and/or biochemical and/or physiological features.

### II. JMJC (JUMONJI-C) Polypeptide

[0243] Surprisingly, it has now been found that modulating expression in a plant of a nucleic acid encoding a JMJC polypeptide gives plants having enhanced yield-related traits relative to control plants. According to a first embodiment, the present invention provides a method for enhancing yield-related traits in plants relative to control plants, comprising modulating expression in a plant of a nucleic acid encoding a JMJC polypeptide.

[0244] A preferred method for modulating (preferably, increasing) expression of a nucleic acid encoding a JMJC polypeptide is by introducing and expressing in a plant a nucleic acid encoding a JMJC polypeptide.

[0245] Any reference hereinafter to a “protein useful in the methods of the invention” is taken to mean a JMJC polypeptide as defined herein. Any reference hereinafter to a “nucleic acid useful in the methods of the invention” is taken to mean a nucleic acid capable of encoding such a JMJC polypeptide. The nucleic acid to be introduced into a plant (and therefore useful in performing the methods of the invention) is any nucleic acid encoding the type of protein, which will now be described, hereafter also named “JMJC nucleic acid” or “JMJC gene”.

[0246] A JMJC polypeptide as defined herein refers to a polypeptide comprising at least a JmjC domain.

[0247] The JmjC domain is a conserved sequence found in proteins of prokaryotic and eukaryotic organisms. JmjC domains are in average 111 amino acids long. Typically the length of a JmjC domain can range between 25 to 200 amino acids though shorter and longer versions maybe possible. JmjC domains are predicted to be metalloenzymes that adopt the cupin fold, and are candidates for enzymes that regulate chromatin remodelling (Clissold et al. Trends Biochem Sci. 2001 January; 26(1):7-9).

[0248] JMJC polypeptides can be found in specialized databases such as Pfam, (Finn et al. Nucleic Acids Research (2006) Database Issue 34:D247-D251). Pfam compiles a large collection of multiple sequence alignments and hidden Markov models (HMM) covering many common protein domains and families and is available through the Sanger Institute in the United Kingdom.

[0249] The gathering cutoff threshold of the JmjC domain in the Pfam HMM_fs model is of 16.0 and of −8.0 in the HMM_ls model. Trusted matches as considered in the Pfam database are those scoring higher than the gathering cut-off threshold. However potential matches, comprising true JmjC domains, may still fall under the gathering cut-off. Preferably a JMJC polypeptide is a protein having one or more domains in their sequence that exceed the gathering cutoff of the Pfam protein domain family PF02373, jumonji, jmjC,

[0250] Alternatively, a JmjC domain in a polypeptide may be identified by performing a sequence comparison with known polypeptides comprising a JmjC domain and establishing the similarity in the region of the JmjC domain. The sequences may be aligned using any of the methods well known in the art such as Blast algorithms and the probability for the alignment to occur with a given sequence is taken as basis for identifying similar polypeptides. A parameter that is typically used to represent such probability in pair wise comparisons is called e-value. The e-value describes how often a given score is expected to occur random; The e-value cut-off may be as high as 1.0. Typically alignments with high likelihood to occur have an e-value lower than 0.1, 0.01, 0.001, 1.e-05, 1.e-10, 1.e-15, 1.e-20, 1.e-25, 1.e-50, 1.e-75, 1.e-100 and 1.e-200. Preferably JMJC polypeptides of the invention comprise a sequence having in increasing order of preference an e-value lower than 0.1, 0.01, 0.001, 1.e-05, 1.e-10, 1.e-15, 1.e-20, 1.e-25, 1.e-50, 1.e-75, 1.e-100 and 1.e-200 for an alignment with JmjC domain found in a known JMJC polypeptide.

[0251] Examples of JMJC polypeptides are given in Table B1. The amino acid coordinates of the JmjC domains as present in representative JMJC polypeptides of dicotyledonous origin is given in Table B4. An example of JmjC domain is given in SEQ ID NO: 78.

[0252] The sequence identity between JmjC domains is typically low, in average 23% and maybe as low as 10%. Preferred JMJC polypeptides of the inventions are those having in increasing order of preference at least 50%, 55%, 60%, 65%, 70%, 75%, 80%, 85%, 90%, 95%, or more sequence identity to SEQ ID NO: 78 or to any of the JmjC domains comprised in the JMJC polypeptides represented by SEQ ID NO: 84; SEQ ID NO: 86; SEQ ID NO: 96; SEQ ID NO: 98; SEQ ID NO: 104; SEQ ID NO: 108; SEQ ID NO: 110; SEQ ID NO: 112; SEQ ID NO: 114; SEQ ID NO: 116; SEQ ID NO: 118; SEQ ID NO: 120; SEQ ID NO: 122; SEQ ID NO: 124; SEQ ID NO: 128; SEQ ID NO: 130; SEQ ID NO: 132; and SEQ ID NO: 134, whose amino acid coordinates are given in Table B4.

[0253] In addition to the JmjC domain, JMJC polypeptides may optionally comprise other highly conserved sequence motifs, such as those represented in SEQ ID NO: 79, SEQ ID NO: 80, SEQ ID NO: 81, which are found in SEQ ID NO: 74. Further, the polypeptides of the invention may comprise a conserved sequence found in oxygenases which has been involved in the coordination of iron cations, herein represented by HXD(V) or EXnH (SEQ ID NO: 82), wherein “X” represents any amino acid and “n” represents the number of X-residues ranging between 1-5, both included.

[0254] A preferred JMJC polypeptide of the invention refers to any polypeptide comprising a JmjC domain and optionally having in increasing order of preference at least 50%, 55%, 60%, 65%, 70%, 75%, 80%, 85%, 90%, 95% or more sequence identity to any one or more of the conserved sequence motifs as represented by SEQ ID NO: 79, SEQ ID NO: 80, SEQ ID NO: 81 and SEQ ID NO: 82.

[0255] Evidence of domain swapping in the JUMONJI family of proteins has been reported, (Balciunas and Ronne. Trends Biochem Sci 2000; 25:274-276). Accordingly, in addition to the JmjC domain, JMJC polypeptides typically contain one or more different kinds of other known conserved domains. Relevant to the polypeptides of the invention are JMJC polypeptides that in addition to the JmjC domain comprise other conserved domains, which are presumably involved in DNA binding and transcription activities such as zinc fingers and/or in protein interaction and protein turnover, such as F-box and zinc finger-RING-type domains.

[0256] Therefore the JMJC polypeptide useful in the methods of the invention comprises a JmjC domain and optionally one or more of the following conserved domains: JmJN (pfam accession number PF02375); C5HC2 zinc finger (pfam accession number: PF02928), FY-rich domain, N-terminal (InterPro accession number: IPR003888) and FY-rich domain, C-terminal (InterPro accession number: IPR003889), a Zinc finger FYVE/PHD-Zn type (InterPro accession number: IPR011011), a Zinc finger C2H2 type (pfam accession number: PF00096), a Zinc finger—RING type (zf-C3HC4) (pfam accession number PF00097) and an F-box domain (pfam accession number: PF00646).

[0257] Preferably the JMJC polypeptide of the invention comprises a sequence having in increasing order of preference of 50%, 60%, 70%, 75%, 60%, 85%, 90%, 92%, 94%, 96%, 98% or more sequence identity to SEQ ID NO: 74, SEQ ID NO: 86, SEQ ID NO: 94, SEQ ID NO: 104, SEQ ID NO: 122, SEQ ID NO: 134, SEQ ID NO: 136, SEQ ID NO: 140, SEQ ID NO: 142 and SEQ ID NO: 148.

[0258] Preferably, the polypeptide sequence which when used in the construction of a phylogenetic tree, such as the one depicted in FIG. 8, clusters with the group of JMJC polypeptides (Takeuchi et al. Dev Dyn. 2006 235(9): 2449-59) comprising the amino acid sequence represented by SEQ ID NO: 74 rather than with any other group.

[0259] The term “domain” and “motif” is defined in the “definitions” section herein. Specialist databases exist for the identification of domains, for example, SMART (Schultz et al. (1998) Proc. Natl. Acad. Sci. USA 95, 5857-5864; Letunic et al. (2002) Nucleic Acids Res 30, 242-244, InterPro (Mulder et al., (2003) Nucl. Acids. Res. 31, 315-318, Prosite (Bucher and Bairoch (1994), A generalized profile syntax for biomolecular sequences motifs and its function in automatic sequence interpretation. (In) ISMB-94; Proceedings 2nd International Conference on Intelligent Systems for Molecular Biology. Altman R., Brutlag D., Karp P., Lathrop R., Searls D., Eds., pp53-61, AAAI Press, Menlo Park; Hulo et al., Nucl. Acids. Res. 32:D134-D137, (2004), or Pfam (Bateman et al., Nucleic Acids Research 30(1): 276-280 (2002). A set of tools for in silico analysis of protein sequences is available on the ExPASy proteomics server (Swiss Institute of Bioinformatics (Gasteiger et al., ExPASy: the proteomics server for in-depth protein knowledge and analysis, Nucleic Acids Res. 31:3784-3788(2003)). Domains may also be identified using routine techniques, such as by sequence alignment.

[0260] Methods for the alignment of sequences for comparison are well known in the art, such methods include GAP, BESTFIT, BLAST, FASTA and TFASTA. GAP uses the algorithm of Needleman and Wunsch ((1970) J Mol Biol 48: 443-453) to find the global (i.e. spanning the complete sequences) alignment of two sequences that maximizes the number of matches and minimizes the number of gaps. The BLAST algorithm (Altschul et al. (1990) J Mol Biol 215: 403-10) calculates percent sequence identity and performs a statistical analysis of the similarity between the two sequences. The software for performing BLAST analysis is publicly available through the National Centre for Biotechnology Information (NCBI). Homologues may readily be identified using, for example, the ClustalW multiple sequence alignment algorithm (version 1.83), with the default pairwise alignment parameters, and a scoring method in percentage. Global percentages of similarity and identity may also be determined using one of the methods available in the MatGAT software package (Campanella et al., BMC Bioinformatics. 2003 Jul. 10; 4:29. MatGAT: an application that generates similarity/identity matrices using protein or DNA sequences.). Minor manual editing may be performed to optimise alignment between conserved motifs, as would be apparent to a person skilled in the art. Furthermore, instead of using full-length sequences for the identification of homologues, specific domains may also be used. The sequence identity values may be determined over the entire nucleic acid or amino acid sequence or over selected domains or conserved motif(s), using the programs mentioned above using the default parameters.

[0261] Furthermore, JMJC polypeptides may typically have protein hydroxylases activity, in particular peptide-aspartate beta-dioxygenase (PABD) activity (EC 1.14.11.16). The reaction catalyzed is: peptide L-aspartate+2-oxoglutarate+O(2)<=>peptide 3-hydroxy-L-aspartate+succinate+CO(2). The cofactors in the reaction are iron and 2-Oxogluatarate. Tools and techniques for measuring PABD activity are well known in the art (see for example Lavaissiere et al. J Clin Invest. 1996; 98(6):1313-23; Linke et al. J Biol Chem. 2004; 279(14):14391-7; Lee, et al. J. Biol. Chem. 278:7558-7563; 2003; Lando et al. Genes Dev. 16:1466-1471; 2002). Iron (II)/2-oxoglutarate (2-OG)-dependent oxygenases catalyse oxidative reactions in various metabolic reactions. Recently it has been proposed that JMJC polypeptides can also have histone demethylase activity (Trewick et al. 2005).

[0262] The present invention is illustrated by transforming plants with the nucleic acid sequence represented by SEQ ID NO: 73, encoding the polypeptide sequence of SEQ ID NO: 74. However, performance of the invention is not restricted to these sequences; the methods of the invention may advantageously be performed using any JMJC-encoding nucleic acid or JMJC polypeptide as defined herein.

[0263] Examples of nucleic acids encoding JMJC polypeptides are given in Table B1 of Example 12 herein. Such nucleic acids are useful in performing the methods of the invention. The amino acid sequences given in Table B1 of Example 12 are example sequences of orthologues and paralogues of the JMJC polypeptide represented by SEQ ID NO: 74, the terms “orthologues” and “paralogues” being as defined herein. Further orthologues and paralogues may readily be identified by performing a so-called reciprocal blast search. Typically, this involves a first BLAST involving BLASTing a query sequence (for example using any of the sequences listed in Table B1 of Example 12) against any sequence database, such as the publicly available NCBI database. BLASTN or TBLASTX (using standard default values) are generally used when starting from a nucleotide sequence, and BLASTP or TBLASTN (using standard default values) when starting from a protein sequence. The BLAST results may optionally be filtered. The full-length sequences of either the filtered results or non-filtered results are then BLASTed back (second BLAST) against sequences from the organism from which the query sequence is derived (where the query sequence is SEQ ID NO: 73 or SEQ ID NO: 74, the second BLAST would therefore be against Arabidopsis sequences). The results of the first and second BLASTs are then compared. A paralogue is identified if a high-ranking hit from the first blast is from the same species as from which the query sequence is derived, a BLAST back then ideally results in the query sequence amongst the highest hits; an orthologue is identified if a high-ranking hit in the first BLAST is not from the same species as from which the query sequence is derived, and preferably results upon BLAST back in the query sequence being among the highest hits.

[0264] High-ranking hits are those having a low E-value. The lower the E-value, the more significant the score (or in other words the lower the chance that the hit was found by chance). Computation of the E-value is well known in the art. In addition to E-values, comparisons are also scored by percentage identity. Percentage identity refers to the number of identical nucleotides (or amino acids) between the two compared nucleic acid (or polypeptide) sequences over a particular length. In the case of large families, ClustalW may be used, followed by a neighbour joining tree, to help visualize clustering of related genes and to identify orthologues and paralogues.

[0265] Nucleic acid variants may also be useful in practising the methods of the invention. Examples of such variants include nucleic acids encoding homologues and derivatives of any one of the amino acid sequences given in Table B1 of Example 12, the terms “homologue” and “derivative” being as defined herein. Also useful in the methods of the invention are nucleic acids encoding homologues and derivatives of orthologues or paralogues of any one of the amino acid sequences given in Table B1 of Example 12. Homologues and derivatives useful in the methods of the present invention have substantially the same biological and functional activity as the unmodified protein from which they are derived.

[0266] Further nucleic acid variants useful in practising the methods of the invention include portions of nucleic acids encoding JMJC polypeptides, nucleic acids hybridising to nucleic acids encoding JMJC polypeptides, splice variants of nucleic acids encoding JMJC polypeptides, allelic variants of nucleic acids encoding JMJC polypeptides and variants of nucleic acids encoding JMJC polypeptides obtained by gene shuffling. The terms hybridising sequence, splice variant, allelic variant and gene shuffling are as described herein.

[0267] Nucleic acids encoding JMJC polypeptides need not be full-length nucleic acids, since performance of the methods of the invention does not rely on the use of full-length nucleic acid sequences. According to the present invention, there is provided a method for enhancing yield-related traits in plants, comprising introducing and expressing in a plant a portion of any one of the nucleic acid sequences given in Table B1 of Example 12, or a portion of a nucleic acid encoding an orthologue, paralogue or homologue of any of the amino acid sequences given in Table B1 of Example 12.

[0268] A portion of a nucleic acid may be prepared, for example, by making one or more deletions to the nucleic acid. The portions may be used in isolated form or they may be fused to other coding (or non-coding) sequences in order to, for example, produce a protein that combines several activities. When fused to other coding sequences, the resultant polypeptide produced upon translation may be bigger than that predicted for the protein portion.

[0269] Portions useful in the methods of the invention, encode a JMJC polypeptide as defined herein, and have substantially the same biological activity as the amino acid sequences given in Table B1 of Example 12. Preferably, the portion is a portion of any one of the nucleic acids given in Table B1 of Example 12, or is a portion of a nucleic acid encoding an orthologue or paralogue of any one of the amino acid sequences given in Table B1 of Example 12. Preferably the portion is at least 100, 200, 500, 550, 600, 650, 700, 750, 800, 850, 900, 950, 1000, 1500, 2000, 2500, 3000, 3500, 4000, 4500, 5000 consecutive nucleotides in length, the consecutive nucleotides being of any one of the nucleic acid sequences given in Table B1 of Example 12, or of a nucleic acid encoding an orthologue or paralogue of any one of the amino acid sequences given in Table B1 of Example 12. Most preferably the portion is a portion of the nucleic acid of SEQ ID NO: 73. Preferably, the portion encodes an amino acid sequence which when used in the construction of a phylogenetic tree, such as the one depicted in FIG. 8, clusters with the group of JMJC polypeptides (Takeuchi et al. Dev Dyn. 2006 235(9):2449-59) comprising the amino acid sequence represented by SEQ ID NO: 74 rather than with any other group.

[0270] Another nucleic acid variant useful in the methods of the invention is a nucleic acid capable of hybridising, under reduced stringency conditions, preferably under stringent conditions, with a nucleic acid encoding a JMJC polypeptide as defined herein, or with a portion as defined herein.

[0271] According to the present invention, there is provided a method for enhancing yield-related traits in plants, comprising introducing and expressing in a plant a nucleic acid capable of hybridizing to any one of the nucleic acids given in Table B1 of Example 12, or comprising introducing and expressing in a plant a nucleic acid capable of hybridising to a nucleic acid encoding an orthologue, paralogue or homologue of any of the nucleic acid sequences given in Table B1 of Example 12.

[0272] Hybridising sequences useful in the methods of the invention encode a JMJC polypeptide as defined herein, and have substantially the same biological activity as the amino acid sequences given in Table B1 of Example 12. Preferably, the hybridising sequence is capable of hybridising to any one of the nucleic acids given in Table B1 of Example 12, or to a portion of any of these sequences, a portion being as defined above, or wherein the hybridising sequence is capable of hybridising to a nucleic acid encoding an orthologue or paralogue of any one of the amino acid sequences given in Table B1 of Example 12. Most preferably, the hybridising sequence is capable of hybridising to a nucleic acid as represented by SEQ ID NO: 73 or to a portion thereof.

[0273] Preferably, the hybridising sequence encodes an amino acid sequence which when used in the construction of a phylogenetic tree, such as the one depicted in FIG. 8, clusters with the group of JMJC polypeptides (Takeuchi et al. Dev Dyn. 2006 235(9):2449-59) comprising the amino acid sequence represented by SEQ ID NO: 74 rather than with any other group.

[0274] Another nucleic acid variant useful in the methods of the invention is a splice variant encoding a JMJC polypeptide as defined hereinabove, a splice variant being as defined herein.

[0275] According to the present invention, there is provided a method for enhancing yield-related traits in plants, comprising introducing and expressing in a plant a splice variant of any one of the nucleic acid sequences given in Table B1 of Example 12, or a splice variant of a nucleic acid encoding an orthologue, paralogue or homologue of any of the amino acid sequences given in Table B1 of Example 12. An example of a spliced variant of the gene encoding SEQ ID NO: 74 is represented by SEQ ID NO: 73 and SEQ ID NO: 83 (encoding SEQ ID NO: 84).

[0276] Preferred splice variants are splice variants of a nucleic acid represented by SEQ ID NO: 73, or a splice variant of a nucleic acid encoding an orthologue or paralogue of SEQ ID NO: 74. Preferably, the amino acid sequence encoded by the splice variant, when used in the construction of a phylogenetic tree, such as the one depicted in FIG. 8, clusters with the group of JMJC polypeptides (Takeuchi et al. Dev Dyn. 2006 235(9):2449-59) comprising the amino acid sequence represented by SEQ ID NO: 74 any other group.

[0277] Another nucleic acid variant useful in performing the methods of the invention is an allelic variant of a nucleic acid encoding a JMJC polypeptide as defined hereinabove, an allelic variant being as defined herein.

[0278] According to the present invention, there is provided a method for enhancing yield-related traits in plants, comprising introducing and expressing in a plant an allelic variant of any one of the nucleic acids given in Table B1 of Example 12, or comprising introducing and expressing in a plant an allelic variant of a nucleic acid encoding an orthologue, paralogue or homologue of any of the amino acid sequences given in Table B1 of Example 12.

[0279] The allelic variants useful in the methods of the present invention have substantially the same biological activity as the JMJC polypeptide of SEQ ID NO: 74 and any of the amino acids depicted in Table B1 of Example 12. Allelic variants exist in nature, and encompassed within the methods of the present invention is the use of these natural alleles. Preferably, the allelic variant is an allelic variant of SEQ ID NO: 73 or an allelic variant of a nucleic acid encoding an orthologue or paralogue of SEQ ID NO: 74. Preferably, the amino acid sequence encoded by the allelic variant, when used in the construction of a phylogenetic tree, such as the one depicted in FIG. 8, clusters with the JMJC polypeptides (Takeuchi et al. Dev Dyn. 2006 235(9):2449-59) comprising the amino acid sequence represented by SEQ ID NO: 74 rather than with any other group.

[0280] Gene shuffling or directed evolution may also be used to generate variants of nucleic acids encoding JMJC polypeptides as defined above; the term “gene shuffling” being as defined herein.

[0281] According to the present invention, there is provided a method for enhancing yield-related traits in plants, comprising introducing and expressing in a plant a variant of any one of the nucleic acid sequences given in Table B1 of Example 12, or comprising introducing and expressing in a plant a variant of a nucleic acid encoding an orthologue, paralogue or homologue of any of the amino acid sequences given in Table B1 of Example 12, which variant nucleic acid is obtained by gene shuffling.

[0282] Advantageously, the present invention provides hitherto unknown JMJ nucleic acid and polypeptide sequences.

[0283] According to a further embodiment of the present invention, there is provided an isolated nucleic acid molecule comprising:
[0284] (i) a nucleic acid represented by SEQ ID NO: 169;
[0285] (ii) a nucleic acid or fragment thereof that is complementary to SEQ ID NO: 169;
[0286] (iii) a nucleic acid encoding an JMJC polypeptide having, in increasing order of preference, at least 70%, 75%, 80%, 85%, 90%, 95%, 96%, 97%, 98%, 99% or more sequence identity to the amino acid sequence given in SEQ ID NO: 170;
[0287] (iv) a nucleic acid capable of hybridizing under stringent conditions to any one of the nucleic acids given in (i), (ii) or (iii) above.

[0288] According to a further embodiment of the present invention, there is therefore provided an isolated polypeptide comprising:
[0289] (i) an amino acid sequence having, in increasing order of preference, at least 70%, 75%, 80%, 85%, 90%, 95%, 96%, 97%, 98%, 99% or 100% or more sequence identity to the amino acid sequence given in SEQ ID NO: 170;
[0290] (ii) derivatives of any of the amino acid sequences given in (i).

[0291] Preferably, the amino acid sequence encoded by the variant nucleic acid obtained by gene shuffling, when used in the construction of a phylogenetic tree such as the one depicted in FIG. 8, clusters with the group of JMJC polypeptides (Takeuchi et al. Dev Dyn. 2006 235(9):2449-59) comprising the amino acid sequence represented by SEQ ID NO: 74 rather than with any other group.

[0292] Furthermore, nucleic acid variants may also be obtained by site-directed mutagenesis. Several methods are available to achieve site-directed mutagenesis, the most common being PCR based methods (Current Protocols in Molecular Biology. Wiley Eds.).

[0293] Nucleic acids encoding JMJC polypeptides may be derived from any natural or artificial source. The nucleic acid may be modified from its native form in composition and/or genomic environment through deliberate human manipulation. Preferably the JMJC polypeptide-encoding nucleic acid is from a plant, further preferably from a dicotyledonous plant, more preferably from the family Brassicaceae, most preferably the nucleic acid is from Arabidopsis thaliana.

[0294] Performance of the methods of the invention gives plants having enhanced yield-related traits. In particular performance of the methods of the invention gives plants having increased yield, especially increased seed yield relative to control plants. The terms “yield” and “seed yield” are described in more detail in the “definitions” section herein.

[0295] Reference herein to enhanced yield-related traits is taken to mean an increase in biomass (weight) of one or more parts of a plant, which may include aboveground (harvestable) parts and/or (harvestable) parts below ground. In particular, such harvestable parts are seeds, and performance of the methods of the invention results in plants having increased yield relative to the yield of control plants.

[0296] Taking corn as an example, a yield increase may be manifested as one or more of the following: increase in the number of plants established per hectare or acre, an increase in the number of ears per plant, an increase in the number of rows, number of kernels per row, kernel weight, thousand kernel weight, ear length/diameter, increase in the seed filling rate (which is the number of filled seeds divided by the total number of seeds and multiplied by 100), among others. Taking rice as an example, a yield increase may manifest itself as an increase in one or more of the following: number of plants per hectare or acre, number of panicles per plant, number of spikelets per panicle, number of flowers (florets) per panicle (which is expressed as a ratio of the number of filled seeds over the number of primary panicles), increase in the seed filling rate (which is the number of filled seeds divided by the total number of seeds and multiplied by 100), increase in thousand kernel weight, among others.

[0297] The present invention provides a method for increasing yield, especially seed yield of plants, relative to control plants, which method comprises modulating expression, preferably increasing expression, in a plant of a nucleic acid encoding a JMJC polypeptide as defined herein.

[0298] Since the transgenic plants according to the present invention have increased yield, it is likely that these plants exhibit an increased growth rate (during at least part of their life cycle), relative to the growth rate of control plants at a corresponding stage in their life cycle.

[0299] The increased growth rate may be specific to one or more parts of a plant (including seeds), or may be throughout substantially the whole plant. Plants having an increased growth rate may have a shorter life cycle. The life cycle of a plant may be taken to mean the time needed to grow from a dry mature seed up to the stage where the plant has produced dry mature seeds, similar to the starting material. This life cycle may be influenced by factors such as early vigour, growth rate, greenness index, flowering time and speed of seed maturation. The increase in growth rate may take place at one or more stages in the life cycle of a plant or during substantially the whole plant life cycle. Increased growth rate during the early stages in the life cycle of a plant may reflect enhanced vigour. The increase in growth rate may alter the harvest cycle of a plant allowing plants to be sown later and/or harvested sooner than would otherwise be possible (a similar effect may be obtained with earlier flowering time). If the growth rate is sufficiently increased, it may allow for the further sowing of seeds of the same plant species (for example sowing and harvesting of rice plants followed by sowing and harvesting of further rice plants all within one conventional growing period). Similarly, if the growth rate is sufficiently increased, it may allow for the further sowing of seeds of different plants species (for example the sowing and harvesting of corn plants followed by, for example, the sowing and optional harvesting of soybean, potato or any other suitable plant). Harvesting additional times from the same rootstock in the case of some crop plants may also be possible. Altering the harvest cycle of a plant may lead to an increase in annual biomass production per acre (due to an increase in the number of times (say in a year) that any particular plant may be grown and harvested). An increase in growth rate may also allow for the cultivation of transgenic plants in a wider geographical area than their wild-type counterparts, since the territorial limitations for growing a crop are often determined by adverse environmental conditions either at the time of planting (early season) or at the time of harvesting (late season). Such adverse conditions may be avoided if the harvest cycle is shortened. The growth rate may be determined by deriving various parameters from growth curves, such parameters may be: T-Mid (the time taken for plants to reach 50% of their maximal size) and T-90 (time taken for plants to reach 90% of their maximal size), amongst others.

[0300] According to a preferred feature of the present invention, performance of the methods of the invention gives plants having an increased growth rate relative to control plants. Therefore, according to the present invention, there is provided a method for increasing the growth rate of plants, which method comprises modulating expression, preferably increasing expression, in a plant of a nucleic acid encoding a JMJC polypeptide as defined herein.

[0301] An increase in yield and/or growth rate occurs whether the plant is under non-stress conditions or whether the plant is exposed to various stresses compared to control plants. Plants typically respond to exposure to stress by growing more slowly. In conditions of severe stress, the plant may even stop growing altogether. Mild stress on the other hand is defined herein as being any stress to which a plant is exposed which does not result in the plant ceasing to grow altogether without the capacity to resume growth. Mild stress in the sense of the invention leads to a reduction in the growth of the stressed plants of less than 40%, 35% or 30%, preferably less than 25%, 20% or 15%, more preferably less than 14%, 13%, 12%, 11% or 10% or less in comparison to the control plant under non-stress conditions. Due to advances in agricultural practices (irrigation, fertilization, pesticide treatments) severe stresses are not often encountered in cultivated crop plants. As a consequence, the compromised growth induced by mild stress is often an undesirable feature for agriculture. Mild stresses are the everyday biotic and/or abiotic (environmental) stresses to which a plant is exposed. Abiotic stresses may be due to drought or excess water, anaerobic stress, salt stress, chemical toxicity, oxidative stress and hot, cold or freezing temperatures. The abiotic stress may be an osmotic stress caused by a water stress (particularly due to drought), salt stress, oxidative stress or an ionic stress. Biotic stresses are typically those stresses caused by pathogens, such as bacteria, viruses, fungi and insects.

[0302] In particular, the methods of the present invention may be performed under non-stress conditions or under conditions of mild drought to give plants having increased yield relative to control plants. As reported in Wang et al. (Planta (2003) 218: 1-14), abiotic stress leads to a series of morphological, physiological, biochemical and molecular changes that adversely affect plant growth and productivity. Drought, salinity, extreme temperatures and oxidative stress are known to be interconnected and may induce growth and cellular damage through similar mechanisms. Rabbani et al. (Plant Physiol (2003) 133: 1755-1767) describes a particularly high degree of “cross talk” between drought stress and high-salinity stress. For example, drought and/or salinisation are manifested primarily as osmotic stress, resulting in the disruption of homeostasis and ion distribution in the cell. Oxidative stress, which frequently accompanies high or low temperature, salinity or drought stress, may cause denaturing of functional and structural proteins. As a consequence, these diverse environmental stresses often activate similar cell signalling pathways and cellular responses, such as the production of stress proteins, up-regulation of anti-oxidants, accumulation of compatible solutes and growth arrest. The term “non-stress” conditions as used herein are those environmental conditions that allow optimal growth of plants. Persons skilled in the art are aware of normal soil conditions and climatic conditions for a given location. Plants with optimal growth conditions, (grown under non-stress conditions) typically yield in increasing order of preference at least 90%, 87%, 85%, 83%, 80%, 77% or 75% of the average production of such plant in a given environment. Average production may be calculated on harvest and/or season basis. Persons skilled in the art are aware of average yield productions of a crop.

[0303] Performance of the methods of the invention gives plants grown under non-stress conditions or under mild drought conditions increased yield relative to control plants grown under comparable conditions. Therefore, according to the present invention, there is provided a method for increasing yield in plants grown under non-stress conditions or under mild drought conditions, which method comprises increasing expression in a plant of a nucleic acid encoding a JMJC polypeptide.

[0304] Performance of the methods of the invention gives plants grown under conditions of nutrient deficiency, particularly under conditions of nitrogen deficiency, increased yield relative to control plants grown under comparable conditions. Therefore, according to the present invention, there is provided a method for increasing yield in plants grown under conditions of nutrient deficiency, which method comprises increasing expression in a plant of a nucleic acid encoding a JMJC polypeptide. Nutrient deficiency may result from a lack or excess of nutrients such as nitrogen, phosphates and other phosphorous-containing compounds, potassium, calcium, cadmium, magnesium, manganese, iron and boron, amongst others.

[0305] The present invention encompasses plants or parts thereof (including seeds) obtainable by the methods according to the present invention. The plants or parts thereof comprise a nucleic acid transgene encoding a JMJC polypeptide as defined above.

[0306] The invention also provides genetic constructs and vectors to facilitate introduction and/or expression in plants of nucleic acids encoding JMJC polypeptides. The gene constructs may be inserted into vectors, which may be commercially available, suitable for transforming into plants and suitable for expression of the gene of interest in the transformed cells. The invention also provides use of a gene construct as defined herein in the methods of the invention.

[0307] More specifically, the present invention provides a construct comprising:
[0308] (a) a nucleic acid encoding a JMJC polypeptide as defined above;
[0309] (b) one or more control sequences capable of driving expression of the nucleic acid sequence of (a); and optionally
[0310] (c) a transcription termination sequence.

[0311] Preferably, the nucleic acid encoding a JMJC polypeptide is as defined above. The term “control sequence” and “termination sequence” are as defined herein.

[0312] Plants are transformed with a vector comprising any of the nucleic acids described above. The skilled artisan is well aware of the genetic elements that must be present on the vector in order to successfully transform, select and propagate host cells containing the sequence of interest. The sequence of interest is operably linked to one or more control sequences (at least to a promoter).

[0313] Advantageously, any type of promoter, whether natural or synthetic, may be used to drive expression of the nucleic acid sequence. A constitutive promoter is particularly useful in the methods. See the “Definitions” section herein for definitions of the various promoter types.

[0314] It should be clear that the applicability of the present invention is not restricted to the JMJC polypeptide-encoding nucleic acid represented by SEQ ID NO: 73, nor is the applicability of the invention restricted to expression of a JMJC polypeptide-encoding nucleic acid when driven by a constitutive promoter.

[0315] The constitutive promoter is preferably a GOS2 promoter, preferably a GOS2 promoter from rice. Further preferably the constitutive promoter is represented by a nucleic acid sequence substantially similar to SEQ ID NO: 75, most preferably the constitutive promoter is as represented by SEQ ID NO: 75. See the “Definitions” section herein for further examples of constitutive promoters.

[0316] Optionally, one or more terminator sequences may be used in the construct introduced into a plant. Additional regulatory elements may include transcriptional as well as translational enhancers. Those skilled in the art will be aware of terminator and enhancer sequences that may be suitable for use in performing the invention. An intron sequence may also be added to the 5′ untranslated region (UTR) or in the coding sequence to increase the amount of the mature message that accumulates in the cytosol, as described in the definitions section. Other control sequences (besides promoter, enhancer, silencer, intron sequences, 3′UTR and/or 5′UTR regions) may be protein and/or RNA stabilizing elements. Such sequences would be known or may readily be obtained by a person skilled in the art.

[0317] The genetic constructs of the invention may further include an origin of replication sequence that is required for maintenance and/or replication in a specific cell type. One example is when a genetic construct is required to be maintained in a bacterial cell as an episomal genetic element (e.g. plasmid or cosmid molecule). Preferred origins of replication include, but are not limited to, the f1-ori and colE1.

[0318] For the detection of the successful transfer of the nucleic acid sequences as used in the methods of the invention and/or selection of transgenic plants comprising these nucleic acids, it is advantageous to use marker genes (or reporter genes). Therefore, the genetic construct may optionally comprise a selectable marker gene. Selectable markers are described in more detail in the “definitions” section herein.

[0319] It is known that upon stable or transient integration of nucleic acids into plant cells, only a minority of the cells takes up the foreign DNA and, if desired, integrates it into its genome, depending on the expression vector used and the transfection technique used. To identify and select these integrants, a gene coding for a selectable marker (such as the ones described above) is usually introduced into the host cells together with the gene of interest. These markers can for example be used in mutants in which these genes are not functional by, for example, deletion by conventional methods. Furthermore, nucleic acid molecules encoding a selectable marker can be introduced into a host cell on the same vector that comprises the sequence encoding the polypeptides of the invention or used in the methods of the invention, or else in a separate vector. Cells which have been stably transfected with the introduced nucleic acid can be identified for example by selection (for example, cells which have integrated the selectable marker survive whereas the other cells die). The marker genes may be removed or excised from the transgenic cell once they are no longer needed. Techniques for marker gene removal are known in the art, useful techniques are described above in the definitions section.

[0320] The invention also provides a method for the production of transgenic plants having enhanced yield-related traits relative to control plants, comprising introduction and expression in a plant of any nucleic acid encoding a JMJC polypeptide as defined hereinabove.

[0321] More specifically, the present invention provides a method for the production of transgenic plants having increased enhanced yield-related traits, particularly increased (seed) yield, which method comprises:
[0322] (i) introducing and expressing in a plant or plant cell a JMJC polypeptide-encoding nucleic acid; and
[0323] (ii) cultivating the plant cell under conditions promoting plant growth and development.

[0324] The nucleic acid of (i) may be any of the nucleic acids capable of encoding a JMJC polypeptide as defined herein.

[0325] The nucleic acid may be introduced directly into a plant cell or into the plant itself (including introduction into a tissue, organ or any other part of a plant). According to a preferred feature of the present invention, the nucleic acid is preferably introduced into a plant by transformation. The term “transformation” is described in more detail in the “definitions” section herein.

[0326] The genetically modified plant cells can be regenerated via all methods with which the skilled worker is familiar. Suitable methods can be found in the abovementioned publications by S. D. Kung and R. Wu, Potrykus or Hofgen and Willmitzer.

[0327] Generally after transformation, plant cells or cell groupings are selected for the presence of one or more markers which are encoded by plant-expressible genes co-transferred with the gene of interest, following which the transformed material is regenerated into a whole plant. To select transformed plants, the plant material obtained in the transformation is, as a rule, subjected to selective conditions so that transformed plants can be distinguished from untransformed plants. For example, the seeds obtained in the above-described manner can be planted and, after an initial growing period, subjected to a suitable selection by spraying. A further possibility consists in growing the seeds, if appropriate after sterilization, on agar plates using a suitable selection agent so that only the transformed seeds can grow into plants. Alternatively, the transformed plants are screened for the presence of a selectable marker such as the ones described above.

[0328] Following DNA transfer and regeneration, putatively transformed plants may also be evaluated, for instance using Southern analysis, for the presence of the gene of interest, copy number and/or genomic organisation. Alternatively or additionally, expression levels of the newly introduced DNA may be monitored using Northern and/or Western analysis, both techniques being well known to persons having ordinary skill in the art.

[0329] The generated transformed plants may be propagated by a variety of means, such as by clonal propagation or classical breeding techniques. For example, a first generation (or T1) transformed plant may be selfed and homozygous second-generation (or T2) transformants selected, and the T2 plants may then further be propagated through classical breeding techniques. The generated transformed organisms may take a variety of forms. For example, they may be chimeras of transformed cells and non-transformed cells; clonal transformants (e.g., all cells transformed to contain the expression cassette); grafts of transformed and untransformed tissues (e.g., in plants, a transformed rootstock grafted to an untransformed scion).

[0330] The present invention clearly extends to any plant cell or plant produced by any of the methods described herein, and to all plant parts and propagules thereof. The present invention extends further to encompass the progeny of a primary transformed or transfected cell, tissue, organ or whole plant that has been produced by any of the aforementioned methods, the only requirement being that progeny exhibit the same genotypic and/or phenotypic characteristic(s) as those produced by the parent in the methods according to the invention.

[0331] The invention also includes host cells containing an isolated nucleic acid encoding a JMJC polypeptide as defined hereinabove. Preferred host cells according to the invention are plant cells. Host plants for the nucleic acids or the vector used in the method according to the invention, the expression cassette or construct or vector are, in principle, advantageously all plants, which are capable of synthesizing the polypeptides used in the inventive method.

[0332] The methods of the invention are advantageously applicable to any plant. Plants that are particularly useful in the methods of the invention include all plants which belong to the superfamily Viridiplantae, in particular monocotyledonous and dicotyledonous plants including fodder or forage legumes, ornamental plants, food crops, trees or shrubs. According to a preferred embodiment of the present invention, the plant is a crop plant. Examples of crop plants include soybean, sunflower, canola, alfalfa, rapeseed, cotton, tomato, potato and tobacco. Further preferably, the plant is a monocotyledonous plant. Examples of monocotyledonous plants include sugarcane. More preferably the plant is a cereal. Examples of cereals include rice, maize, wheat, barley, millet, rye, triticale, sorghum and oats.

[0333] The invention also extends to harvestable parts of a plant such as, but not limited to seeds, leaves, fruits, flowers, stems, roots, rhizomes, tubers and bulbs. The invention furthermore relates to products derived, preferably directly derived, from a harvestable part of such a plant, such as dry pellets or powders, oil, fat and fatty acids, starch or proteins.

[0334] According to a preferred feature of the invention, the modulated expression is increased expression. Methods for increasing expression of nucleic acids or genes, or gene products, are well documented in the art and examples are provided in the definitions section.

[0335] As mentioned above, a preferred method for modulating (preferably, increasing) expression of a nucleic acid encoding a JMJC polypeptide is by introducing and expressing in a plant a nucleic acid encoding a JMJC polypeptide; however the effects of performing the method, i.e. enhancing yield-related traits may also be achieved using other well known techniques, including but not limited to T-DNA activation tagging, TILLING, homologous recombination. A description of these techniques is provided in the definitions section.

[0336] The present invention also encompasses use of nucleic acids encoding JMJC polypeptides as described herein and use of these JMJC polypeptides in enhancing any of the aforementioned yield-related traits in plants.

[0337] Nucleic acids encoding JMJC polypeptides described herein, or the JMJC polypeptides themselves, may find use in breeding programmes in which a DNA marker is identified which may be genetically linked to a JMJC polypeptide-encoding gene. The nucleic acids/genes, or the JMJC polypeptides themselves may be used to define a molecular marker. This DNA or protein marker may then be used in breeding programmes to select plants having enhanced yield-related traits as defined hereinabove in the methods of the invention.

[0338] Allelic variants of a JMJC polypeptide-encoding nucleic acid/gene may also find use in marker-assisted breeding programmes. Such breeding programmes sometimes require introduction of allelic variation by mutagenic treatment of the plants, using for example EMS mutagenesis; alternatively, the programme may start with a collection of allelic variants of so called “natural” origin caused unintentionally. Identification of allelic variants then takes place, for example, by PCR. This is followed by a step for selection of superior allelic variants of the sequence in question and which give increased yield. Selection is typically carried out by monitoring growth performance of plants containing different allelic variants of the sequence in question. Growth performance may be monitored in a greenhouse or in the field. Further optional steps include crossing plants in which the superior allelic variant was identified with another plant. This could be used, for example, to make a combination of interesting phenotypic features.

[0339] Nucleic acids encoding JMJC polypeptides may also be used as probes for genetically and physically mapping the genes that they are a part of, and as markers for traits linked to those genes. Such information may be useful in plant breeding in order to develop lines with desired phenotypes. Such use of JMJC polypeptide-encoding nucleic acids requires only a nucleic acid sequence of at least 15 nucleotides in length. The JMJC polypeptide-encoding nucleic acids may be used as restriction fragment length polymorphism (RFLP) markers. Southern blots (Sambrook J, Fritsch E F and Maniatis T (1989) Molecular Cloning, A Laboratory Manual) of restriction-digested plant genomic DNA may be probed with the JMJC-encoding nucleic acids. The resulting banding patterns may then be subjected to genetic analyses using computer programs such as MapMaker (Lander et al. (1987) Genomics 1: 174-181) in order to construct a genetic map. In addition, the nucleic acids may be used to probe Southern blots containing restriction endonuclease-treated genomic DNAs of a set of individuals representing parent and progeny of a defined genetic cross. Segregation of the DNA polymorphisms is noted and used to calculate the position of the JMJC polypeptide-encoding nucleic acid in the genetic map previously obtained using this population (Botstein et al. (1980) Am. J. Hum. Genet. 32:314-331).

[0340] The production and use of plant gene-derived probes for use in genetic mapping is described in Bernatzky and Tanksley (1986) Plant Mol. Biol. Reporter 4: 37-41. Numerous publications describe genetic mapping of specific cDNA clones using the methodology outlined above or variations thereof. For example, F2 intercross populations, backcross populations, randomly mated populations, near isogenic lines, and other sets of individuals may be used for mapping. Such methodologies are well known to those skilled in the art.

[0341] The nucleic acid probes may also be used for physical mapping (i.e., placement of sequences on physical maps; see Hoheisel et al. In: Non-mammalian Genomic Analysis: A Practical Guide, Academic press 1996, pp. 319-346, and references cited therein).

[0342] In another embodiment, the nucleic acid probes may be used in direct fluorescence in situ hybridisation (FISH) mapping (Trask (1991) Trends Genet. 7:149-154). Although current methods of FISH mapping favour use of large clones (several kb to several hundred kb; see Laan et al. (1995) Genome Res. 5:13-20), improvements in sensitivity may allow performance of FISH mapping using shorter probes.

[0343] A variety of nucleic acid amplification-based methods for genetic and physical mapping may be carried out using the nucleic acids. Examples include allele-specific amplification (Kazazian (1989) J. Lab. Clin. Med 11:95-96), polymorphism of PCR-amplified fragments (CAPS; Sheffield et al. (1993) Genomics 16:325-332), allele-specific ligation (Landegren et al. (1988) Science 241:1077-1080), nucleotide extension reactions (Sokolov (1990) Nucleic Acid Res. 18:3671), Radiation Hybrid Mapping (Walter et al. (1997) Nat. Genet. 7:22-28) and Happy Mapping (Dear and Cook (1989) Nucleic Acid Res. 17:6795-6807). For these methods, the sequence of a nucleic acid is used to design and produce primer pairs for use in the amplification reaction or in primer extension reactions. The design of such primers is well known to those skilled in the art. In methods employing PCR-based genetic mapping, it may be necessary to identify DNA sequence differences between the parents of the mapping cross in the region corresponding to the instant nucleic acid sequence. This, however, is generally not necessary for mapping methods.

[0344] The methods according to the present invention result in plants having enhanced yield-related traits, as described hereinbefore. These traits may also be combined with other economically advantageous traits, such as further yield-enhancing traits, tolerance to other abiotic and biotic stresses, traits modifying various architectural features and/or biochemical and/or physiological features.

### III. CKI (Casein Kinase I) Polypeptide

[0345] Surprisingly, it has now been found that modulating expression in a plant of a nucleic acid encoding a CKI polypeptide gives plants having enhanced yield-related traits relative to control plants. According to a first embodiment, the present invention provides a method for enhancing yield-related traits in plants relative to control plants, comprising modulating expression in a plant of a nucleic acid encoding a CKI polypeptide.

[0346] A preferred method for modulating (preferably, increasing) expression of a nucleic acid encoding a CKI polypeptide is by introducing and expressing in a plant a nucleic acid encoding a CKI polypeptide.

[0347] Any reference hereinafter to a “protein useful in the methods of the invention” is taken to mean a CKI polypeptide as defined herein. Any reference hereinafter to a “nucleic acid useful in the methods of the invention” is taken to mean a nucleic acid capable of encoding such a CKI polypeptide. The nucleic acid to be introduced into a plant (and therefore useful in performing the methods of the invention) is any nucleic acid encoding the type of protein which will now be described, hereafter also named “CKI nucleic acid” or “CKI gene”.

[0348] A “CKI polypeptide” as defined herein refers the proteins represented by SEQ ID NO: 174 and to homologues (orthologues and paralogues) thereof. Preferably, the homologues of SEQ ID NO: 174 have a casein kinase domain.

[0349] The term “domain” and “motif” is defined in the “definitions” section herein. Specialist databases exist for the identification of domains, for example, SMART (Schultz et al. (1998) Proc. Natl. Acad. Sci. USA 95, 5857-5864; Letunic et al. (2002) Nucleic Acids Res 30, 242-244), InterPro (Mulder et al., (2003) Nucl. Acids. Res. 31, 315-318), Prosite (Bucher and Bairoch (1994), A generalized profile syntax for biomolecular sequences motifs and its function in automatic sequence interpretation. (In) ISMB-94; Proceedings 2nd International Conference on Intelligent Systems for Molecular Biology. Altman R., Brutlag D., Karp P., Lathrop R., Searls D., Eds., pp53-61, AAAI Press, Menlo Park; Hulo et al., Nucl. Acids. Res. 32:D134-D137, (2004)), or Pfam (Bateman et al., Nucleic Acids Research 30(1): 276-280 (2002)). A set of tools for in silico analysis of protein sequences is available on the ExPASy proteomics server (Swiss Institute of Bioinformatics (Gasteiger et al., ExPASy: the proteomics server for in-depth protein knowledge and analysis, Nucleic Acids Res. 31:3784-3788(2003)). Domains or motifs may also be identified using routine techniques, such as by sequence alignment.

[0350] Methods for the alignment of sequences for comparison are well known in the art, such methods include GAP, BESTFIT, BLAST, FASTA and TFASTA. GAP uses the algorithm of Needleman and Wunsch ((1970) J Mol Biol 48: 443-453) to find the global (i.e. spanning the complete sequences) alignment of two sequences that maximizes the number of matches and minimizes the number of gaps. The BLAST algorithm (Altschul et al. (1990) J Mol Biol 215: 403-10) calculates percent sequence identity and performs a statistical analysis of the similarity between the two sequences. The software for performing BLAST analysis is publicly available through the National Centre for Biotechnology Information (NCBI). Homologues may readily be identified using, for example, the ClustalW multiple sequence alignment algorithm (version 1.83), with the default pairwise alignment parameters, and a scoring method in percentage. Global percentages of similarity and identity may also be determined using one of the methods available in the MatGAT software package (Campanella et al., BMC Bioinformatics. 2003 Jul. 10; 4:29. MatGAT: an application that generates similarity/identity matrices using protein or DNA sequences.). Minor manual editing may be performed to optimise alignment between conserved motifs, as would be apparent to a person skilled in the art. Furthermore, instead of using full-length sequences for the identification of homologues, specific domains may also be used. The sequence identity values may be determined over the entire nucleic acid or amino acid sequence or over selected domains or conserved motif(s), using the programs mentioned above using the default parameters.

[0351] Furthermore, CKI polypeptides, as far as SEQ ID NO: 174 and its homologues are concerned, the CKI proteins useful in the methods in the methods of the present invention typically have kinase activity. Methods for measuring kinase activity are known in the art.

[0352] The present invention is illustrated by transforming plants with the nucleic acid sequence represented by SEQ ID NO: 173, encoding the polypeptide sequence of SEQ ID NO: 174 respectively. However, performance of the invention is not restricted to these sequences; the methods of the invention may advantageously be performed using any CKI-encoding nucleic acid or CKI polypeptide as defined herein.

[0353] Examples of nucleic acids encoding CKI polypeptides may be found in databases known in the art. Such nucleic acids are useful in performing the methods of the invention. Orthologues and paralogues, the terms “orthologues” and “paralogues” being as defined herein, may readily be identified by performing a so-called reciprocal blast search. Typically, this involves a first BLAST involving BLASTing a query sequence (for example using SEQ ID NO: 174) against any sequence database, such as the publicly available NCBI database. BLASTN or TBLASTX (using standard default values) are generally used when starting from a nucleotide sequence, and BLASTP or TBLASTN (using standard default values) when starting from a protein sequence. The BLAST results may optionally be filtered. The full-length sequences of either the filtered results or non-filtered results are then BLASTed back (second BLAST) against sequences from the organism from which the query sequence is derived (where the query sequence is SEQ ID NO: 173 or SEQ ID NO: 174, the second BLAST would therefore be against Nicotiana tabacum sequences). The results of the first and second BLASTs are then compared. A paralogue is identified if a high-ranking hit from the first blast is from the same species as from which the query sequence is derived, a BLAST back then ideally results in the query sequence amongst the highest hits; an orthologue is identified if a high-ranking hit in the first BLAST is not from the same species as from which the query sequence is derived, and preferably results upon BLAST back in the query sequence being among the highest hits.

[0354] High-ranking hits are those having a low E-value. The lower the E-value, the more significant the score (or in other words the lower the chance that the hit was found by chance). Computation of the E-value is well known in the art. In addition to E-values, comparisons are also scored by percentage identity. Percentage identity refers to the number of identical nucleotides (or amino acids) between the two compared nucleic acid (or polypeptide) sequences over a particular length. In the case of large families, ClustalW may be used, followed by a neighbour joining tree, to help visualize clustering of related genes and to identify orthologues and paralogues.

[0355] Nucleic acid variants encoding homologues and derivatives of SEQ ID NO: 174 may also be useful in practising the methods of the invention, the terms “homologue” and “derivative” being as defined herein. Also useful in the methods of the invention are nucleic acids encoding homologues and derivatives of orthologues or paralogues of SEQ ID NO: 174. Homologues and derivatives useful in the methods of the present invention have substantially the same biological and functional activity as the unmodified protein from which they are derived.

[0356] Further nucleic acid variants useful in practising the methods of the invention include portions of nucleic acids encoding CKI polypeptides, nucleic acids hybridising to nucleic acids encoding CKI polypeptides, splice variants of nucleic acids encoding CKI polypeptides, allelic variants of nucleic acids encoding CKI polypeptides and variants of nucleic acids encoding CKI polypeptides obtained by gene shuffling. The terms hybridising sequence, splice variant, allelic variant and gene shuffling are as described herein.

[0357] Nucleic acids encoding CKI polypeptides need not be full-length nucleic acids, since performance of the methods of the invention does not rely on the use of full-length nucleic acid sequences. According to the present invention, there is provided a method for enhancing yield-related traits in plants, comprising introducing and expressing in a plant a portion of SEQ ID NO: 173, or a portion of a nucleic acid encoding an orthologue, paralogue or homologue of SEQ ID NO: 174.

[0358] A portion of a nucleic acid may be prepared, for example, by making one or more deletions to the nucleic acid. The portions may be used in isolated form or they may be fused to other coding (or non-coding) sequences in order to, for example, produce a protein that combines several activities. When fused to other coding sequences, the resultant polypeptide produced upon translation may be bigger than that predicted for the protein portion.

[0359] Portions useful in the methods of the invention, encode a CKI polypeptide as defined herein, and have substantially the same biological activity as the amino acid sequences given in SEQ ID NO: 174. Preferably, the portion is a portion of any one of the nucleic acids given in SEQ ID NO: 173, or is a portion of a nucleic acid encoding an orthologue or paralogue of any one of the amino acid sequences given in SEQ ID NO: 173. Preferably the portion is at least 500, 550, 600, 650, 700, 750, 800, 850, 900, 950, 1000, 1200, 1300, 1400 consecutive nucleotides in length, the consecutive nucleotides being of SEQ ID NO: 173, or of a nucleic acid encoding an orthologue or paralogue of SEQ ID NO: 174. Most preferably the portion is a portion of the nucleic acid of SEQ ID NO: 173.

[0360] Another nucleic acid variant useful in the methods of the invention is a nucleic acid capable of hybridising, under reduced stringency conditions, preferably under stringent conditions, with a nucleic acid encoding a CKI polypeptide as defined herein, or with a portion as defined herein.

[0361] According to the present invention, there is provided a method for enhancing yield-related traits in plants, comprising introducing and expressing in a plant a nucleic acid capable of hybridizing to SEQ ID NO: 173, or comprising introducing and expressing in a plant a nucleic acid capable of hybridising to a nucleic acid encoding an orthologue, paralogue or homologue of SEQ ID NO: 173.

[0362] Hybridising sequences useful in the methods of the invention encode a CKI polypeptide as defined herein, having substantially the same biological activity as the amino acid sequences given in SEQ ID NO: 174. Preferably, the hybridising sequence is capable of hybridising to SEQ ID NO: 173, or to a portion of any of these sequences, a portion being as defined above, or the hybridising sequence is capable of hybridising to a nucleic acid encoding an orthologue or paralogue of SEQ ID NO: 174.

[0363] Another nucleic acid variant useful in the methods of the invention is a splice variant encoding a CKI polypeptide as defined hereinabove, a splice variant being as defined herein.

[0364] According to the present invention, there is provided a method for enhancing yield-related traits in plants, comprising introducing and expressing in a plant a splice variant of SEQ ID NO: 173, or a splice variant of a nucleic acid encoding an orthologue, paralogue or homologue of SEQ ID NO: 174.

[0365] Another nucleic acid variant useful in performing the methods of the invention is an allelic variant of a nucleic acid encoding a CKI polypeptide as defined hereinabove, an allelic variant being as defined herein.

[0366] According to the present invention, there is provided a method for enhancing yield-related traits in plants, comprising introducing and expressing in a plant an allelic variant of SEQ ID NO: 173, or comprising introducing and expressing in a plant an allelic variant of a nucleic acid encoding an orthologue, paralogue or homologue of the amino acid sequences represented by SEQ ID NO: 174.

[0367] The allelic variants useful in the methods of the present invention have substantially the same biological activity as the CKI polypeptide of SEQ ID NO: 174. Allelic variants exist in nature, and encompassed within the methods of the present invention is the use of these natural alleles. Gene shuffling or directed evolution may also be used to generate variants of nucleic acids encoding CKI polypeptides as defined above; the term “gene shuffling” being as defined herein.

[0368] According to the present invention, there is provided a method for enhancing yield-related traits in plants, comprising introducing and expressing in a plant a variant of SEQ ID NO: 173, or comprising introducing and expressing in a plant a variant of a nucleic acid encoding an orthologue, paralogue or homologue of SEQ ID NO: 174, which variant nucleic acid is obtained by gene shuffling.

[0369] Furthermore, nucleic acid variants may also be obtained by site-directed mutagenesis. Several methods are available to achieve site-directed mutagenesis, the most common being PCR based methods (Current Protocols in Molecular Biology. Wiley Eds.).

[0370] Nucleic acids encoding CKI polypeptides may be derived from any natural or artificial source. The nucleic acid may be modified from its native form in composition and/or genomic environment through deliberate human manipulation. Preferably the CKI polypeptide-encoding nucleic acid is from a plant. In the case of SEQ ID NO: 173, the CKI polypeptide encoding nucleic acid is preferably from a dicotyledonous plant, more preferably from the family Solanaceae, most preferably the nucleic acid is from Nicotiana tabacum.

[0371] Performance of the methods of the invention gives plants having enhanced yield-related traits. In particular performance of the methods of the invention gives plants having increased early vigour and increased yield, especially increased biomass and increased seed yield relative to control plants. The terms “yield” and “seed yield” are described in more detail in the “definitions” section herein.

[0372] Reference herein to enhanced yield-related traits is taken to mean an increase in early vigour and/or in biomass (weight) of one or more parts of a plant, which may include aboveground (harvestable) parts and/or (harvestable) parts below ground. In particular, such harvestable parts are biomass and/or seeds, and performance of the methods of the invention results in plants having increased early vigour, biomass and/or seed yield relative to the early vigour, biomass or seed yield of control plants.

[0373] Taking corn as an example, a yield increase may be manifested as one or more of the following: increase in the number of plants established per hectare or acre, an increase in the number of ears per plant, an increase in the number of rows, number of kernels per row, kernel weight, thousand kernel weight, ear length/diameter, increase in the seed filling rate (which is the number of filled seeds divided by the total number of seeds and multiplied by 100), among others. Taking rice as an example, a yield increase may manifest itself as an increase in one or more of the following: number of plants per hectare or acre, number of panicles per plant, number of spikelets per panicle, number of flowers (florets) per panicle (which is expressed as a ratio of the number of filled seeds over the number of primary panicles), increase in the seed filling rate (which is the number of filled seeds divided by the total number of seeds and multiplied by 100), increase in thousand kernel weight, among others.

[0374] The present invention provides a method for increasing yield, especially biomass and/or seed yield of plants, relative to control plants, which method comprises modulating expression, preferably increasing expression, in a plant of a nucleic acid encoding a CKI polypeptide as defined herein.

[0375] Since the transgenic plants according to the present invention have increased yield, it is likely that these plants exhibit an increased growth rate (during at least part of their life cycle), relative to the growth rate of control plants at a corresponding stage in their life cycle.

[0376] The increased growth rate may be specific to one or more parts of a plant (including seeds), or may be throughout substantially the whole plant. Plants having an increased growth rate may have a shorter life cycle. The life cycle of a plant may be taken to mean the time needed to grow from a dry mature seed up to the stage where the plant has produced dry mature seeds, similar to the starting material. This life cycle may be influenced by factors such as early vigour, growth rate, greenness index, flowering time and speed of seed maturation. The increase in growth rate may take place at one or more stages in the life cycle of a plant or during substantially the whole plant life cycle. Increased growth rate during the early stages in the life cycle of a plant may reflect enhanced vigour. The increase in growth rate may alter the harvest cycle of a plant allowing plants to be sown later and/or harvested sooner than would otherwise be possible (a similar effect may be obtained with earlier flowering time). If the growth rate is sufficiently increased, it may allow for the further sowing of seeds of the same plant species (for example sowing and harvesting of rice plants followed by sowing and harvesting of further rice plants all within one conventional growing period). Similarly, if the growth rate is sufficiently increased, it may allow for the further sowing of seeds of different plants species (for example the sowing and harvesting of corn plants followed by, for example, the sowing and optional harvesting of soybean, potato or any other suitable plant). Harvesting additional times from the same rootstock in the case of some crop plants may also be possible. Altering the harvest cycle of a plant may lead to an increase in annual biomass production per acre (due to an increase in the number of times (say in a year) that any particular plant may be grown and harvested). An increase in growth rate may also allow for the cultivation of transgenic plants in a wider geographical area than their wild-type counterparts, since the territorial limitations for growing a crop are often determined by adverse environmental conditions either at the time of planting (early season) or at the time of harvesting (late season). Such adverse conditions may be avoided if the harvest cycle is shortened. The growth rate may be determined by deriving various parameters from growth curves, such parameters may be: T-Mid (the time taken for plants to reach 50% of their maximal size) and T-90 (time taken for plants to reach 90% of their maximal size), amongst others.

[0377] According to a preferred feature of the present invention, performance of the methods of the invention gives plants having an increased growth rate relative to control plants. Therefore, according to the present invention, there is provided a method for increasing the growth rate of plants, which method comprises modulating expression, preferably increasing expression, in a plant of a nucleic acid encoding a CKI polypeptide as defined herein. In a particular embodiment, performance of the methods of the present invention gives plants with increased early vigour.

[0378] An increase in yield and/or growth rate occurs whether the plant is under non-stress conditions or whether the plant is exposed to various stresses compared to control plants. Plants typically respond to exposure to stress by growing more slowly. In conditions of severe stress, the plant may even stop growing altogether. Mild stress on the other hand is defined herein as being any stress to which a plant is exposed which does not result in the plant ceasing to grow altogether without the capacity to resume growth. Mild stress in the sense of the invention leads to a reduction in the growth of the stressed plants of less than 40%, 35% or 30%, preferably less than 25%, 20% or 15%, more preferably less than 14%, 13%, 12%, 11% or 10% or less in comparison to the control plant under non-stress conditions. Due to advances in agricultural practices (irrigation, fertilization, pesticide treatments) severe stresses are not often encountered in cultivated crop plants. As a consequence, the compromised growth induced by mild stress is often an undesirable feature for agriculture. Mild stresses are the everyday biotic and/or abiotic (environmental) stresses to which a plant is exposed. Abiotic stresses may be due to drought or excess water, anaerobic stress, salt stress, chemical toxicity, oxidative stress and hot, cold or freezing temperatures. The abiotic stress may be an osmotic stress caused by a water stress (particularly due to drought), salt stress, oxidative stress or an ionic stress. Biotic stresses are typically those stresses caused by pathogens, such as bacteria, viruses, fungi and insects.

[0379] In particular, the methods of the present invention may be performed under non-stress conditions or under conditions of mild drought to give plants having increased yield relative to control plants. As reported in Wang et al. (Planta (2003) 218: 1-14), abiotic stress leads to a series of morphological, physiological, biochemical and molecular changes that adversely affect plant growth and productivity. Drought, salinity, extreme temperatures and oxidative stress are known to be interconnected and may induce growth and cellular damage through similar mechanisms. Rabbani et al. (Plant Physiol (2003) 133: 1755-1767) describes a particularly high degree of “cross talk” between drought stress and high-salinity stress. For example, drought and/or salinisation are manifested primarily as osmotic stress, resulting in the disruption of homeostasis and ion distribution in the cell. Oxidative stress, which frequently accompanies high or low temperature, salinity or drought stress, may cause denaturing of functional and structural proteins. As a consequence, these diverse environmental stresses often activate similar cell signalling pathways and cellular responses, such as the production of stress proteins, up-regulation of anti-oxidants, accumulation of compatible solutes and growth arrest. The term “non-stress” conditions as used herein are those environmental conditions that allow optimal growth of plants. Persons skilled in the art are aware of normal soil conditions and climatic conditions for a given location. Plants with optimal growth conditions, (grown under non-stress conditions) typically yield in increasing order of preference at least 90%, 87%, 85%, 83%, 80%, 77% or 75% of the average production of such plant in a given environment. Average production may be calculated on harvest and/or season basis. Persons skilled in the art are aware of average yield productions of a crop.

[0380] Performance of the methods of the invention gives plants grown under non-stress conditions or under mild drought conditions increased yield and/or increased early vigour, relative to control plants grown under comparable conditions. Therefore, according to the present invention, there is provided a method for increasing yield and/or early vigour in plants grown under non-stress conditions or under mild drought conditions, which method comprises increasing expression in a plant of a nucleic acid encoding a CKI polypeptide.

[0381] Performance of the methods of the invention gives plants grown under conditions of nutrient deficiency, particularly under conditions of nitrogen deficiency, increased yield relative to control plants grown under comparable conditions. Therefore, according to the present invention, there is provided a method for increasing yield in plants grown under conditions of nutrient deficiency, which method comprises increasing expression in a plant of a nucleic acid encoding a CKI polypeptide. Nutrient deficiency may result from a lack of nutrients such as nitrogen, phosphates and other phosphorous-containing compounds, potassium, calcium, cadmium, magnesium, manganese, iron and boron, amongst others.

[0382] The present invention encompasses plants or parts thereof (including seeds) obtainable by the methods according to the present invention. The plants or parts thereof comprise a nucleic acid transgene encoding a CKI polypeptide as defined above.

[0383] The invention also provides genetic constructs and vectors to facilitate introduction and/or expression in plants of nucleic acids encoding CKI polypeptides. The gene constructs may be inserted into vectors, which may be commercially available, suitable for transforming into plants and suitable for expression of the gene of interest in the transformed cells. The invention also provides use of a gene construct as defined herein in the methods of the invention.

[0384] More specifically, the present invention provides a construct comprising:
[0385] (a) a nucleic acid encoding a CKI polypeptide as defined above;
[0386] (b) one or more control sequences capable of driving expression of the nucleic acid sequence of (a); and optionally
[0387] (c) a transcription termination sequence.

[0388] Preferably, the nucleic acid encoding a CKI polypeptide is as defined above. The term “control sequence” and “termination sequence” are as defined herein.

[0389] Plants are transformed with a vector comprising any of the nucleic acids described above. The skilled artisan is well aware of the genetic elements that must be present on the vector in order to successfully transform, select and propagate host cells containing the sequence of interest. The sequence of interest is operably linked to one or more control sequences (at least to a promoter).

[0390] Advantageously, any type of promoter, whether natural or synthetic, may be used to drive expression of the nucleic acid sequence. A seed specific promoter is particularly useful in the methods of the invention, preferably, the promoter is an embryo specific promoter. See the “Definitions” section herein for definitions of the various promoter types. Also useful in the methods of the invention is a constitutive promoter.

[0391] It should be clear that the applicability of the present invention is not restricted to the CKI polypeptide-encoding nucleic acid represented by SEQ ID NO: 173, nor is the applicability of the invention restricted to expression of a CKI polypeptide-encoding nucleic acid when driven by a seed specific promoter, or when driven by a constitutive promoter.

[0392] The seed specific promoter is preferably a WSI18 promoter, preferably a WSI18 promoter from rice. Further preferably the seed specific promoter is represented by a nucleic acid sequence substantially similar to SEQ ID NO: 175, most preferably the seed specific promoter is as represented by SEQ ID NO: 175. See the “Definitions” section herein for further examples of seed specific promoters.

[0393] Optionally, one or more terminator sequences may be used in the construct introduced into a plant. Additional regulatory elements may include transcriptional as well as translational enhancers. Those skilled in the art will be aware of terminator and enhancer sequences that may be suitable for use in performing the invention. An intron sequence may also be added to the 5′ untranslated region (UTR) or in the coding sequence to increase the amount of the mature message that accumulates in the cytosol, as described in the definitions section. Other control sequences (besides promoter, enhancer, silencer, intron sequences, 3′UTR and/or 5′UTR regions) may be protein and/or RNA stabilizing elements. Such sequences would be known or may readily be obtained by a person skilled in the art.

[0394] The genetic constructs of the invention may further include an origin of replication sequence that is required for maintenance and/or replication in a specific cell type. One example is when a genetic construct is required to be maintained in a bacterial cell as an episomal genetic element (e.g. plasmid or cosmid molecule). Preferred origins of replication include, but are not limited to, the f1-ori and colE1.

[0395] For the detection of the successful transfer of the nucleic acid sequences as used in the methods of the invention and/or selection of transgenic plants comprising these nucleic acids, it is advantageous to use marker genes (or reporter genes). Therefore, the genetic construct may optionally comprise a selectable marker gene. Selectable markers are described in more detail in the “definitions” section herein. The marker genes may be removed or excised from the transgenic cell once they are no longer needed. Techniques for marker removal are known in the art, useful techniques are described above in the definitions section.

[0396] The invention also provides a method for the production of transgenic plants having enhanced yield-related traits relative to control plants, comprising introduction and expression in a plant of any nucleic acid encoding a CKI polypeptide as defined hereinabove.

[0397] More specifically, the present invention provides a method for the production of transgenic plants having increased enhanced yield-related traits, particularly increased early vigour and/or increased yield, which method comprises:
[0398] (i) introducing and expressing in a plant or plant cell a CKI polypeptide-encoding nucleic acid; and
[0399] (ii) cultivating the plant cell under conditions promoting plant growth and development.

[0400] The nucleic acid of (i) may be any of the nucleic acids capable of encoding a CKI polypeptide as defined herein.

[0401] The nucleic acid may be introduced directly into a plant cell or into the plant itself (including introduction into a tissue, organ or any other part of a plant). According to a preferred feature of the present invention, the nucleic acid is preferably introduced into a plant by transformation. The term “transformation” is described in more detail in the “definitions” section herein.

[0402] The genetically modified plant cells can be regenerated via all methods with which the skilled worker is familiar. Suitable methods can be found in the abovementioned publications by S. D. Kung and R. Wu, Potrykus or Höfgen and Willmitzer.

[0403] Generally after transformation, plant cells or cell groupings are selected for the presence of one or more markers which are encoded by plant-expressible genes co-transferred with the gene of interest, following which the transformed material is regenerated into a whole plant. To select transformed plants, the plant material obtained in the transformation is, as a rule, subjected to selective conditions so that transformed plants can be distinguished from untransformed plants. For example, the seeds obtained in the above-described manner can be planted and, after an initial growing period, subjected to a suitable selection by spraying. A further possibility consists in growing the seeds, if appropriate after sterilization, on agar plates using a suitable selection agent so that only the transformed seeds can grow into plants. Alternatively, the transformed plants are screened for the presence of a selectable marker such as the ones described above.

[0404] Following DNA transfer and regeneration, putatively transformed plants may also be evaluated, for instance using Southern analysis, for the presence of the gene of interest, copy number and/or genomic organisation. Alternatively or additionally, expression levels of the newly introduced DNA may be monitored using Northern and/or Western analysis, both techniques being well known to persons having ordinary skill in the art.

[0405] The generated transformed plants may be propagated by a variety of means, such as by clonal propagation or classical breeding techniques. For example, a first generation (or T1) transformed plant may be selfed and homozygous second-generation (or T2) transformants selected, and the T2 plants may then further be propagated through classical breeding techniques. The generated transformed organisms may take a variety of forms. For example, they may be chimeras of transformed cells and non-transformed cells; clonal transformants (e.g., all cells transformed to contain the expression cassette); grafts of transformed and untransformed tissues (e.g., in plants, a transformed rootstock grafted to an untransformed scion).

[0406] The present invention clearly extends to any plant cell or plant produced by any of the methods described herein, and to all plant parts and propagules thereof. The present invention extends further to encompass the progeny of a primary transformed or transfected cell, tissue, organ or whole plant that has been produced by any of the aforementioned methods, the only requirement being that progeny exhibit the same genotypic and/or phenotypic characteristic(s) as those produced by the parent in the methods according to the invention.

[0407] The invention also includes host cells containing an isolated nucleic acid encoding a CKI polypeptide as defined hereinabove. Preferred host cells according to the invention are plant cells. Host plants for the nucleic acids or the vector used in the method according to the invention, the expression cassette or construct or vector are, in principle, advantageously all plants, which are capable of synthesizing the polypeptides used in the inventive method.

[0408] The methods of the invention are advantageously applicable to any plant. Plants that are particularly useful in the methods of the invention include all plants which belong to the superfamily Viridiplantae, in particular monocotyledonous and dicotyledonous plants including fodder or forage legumes, ornamental plants, food crops, trees or shrubs. According to a preferred embodiment of the present invention, the plant is a crop plant. Examples of crop plants include soybean, sunflower, canola, alfalfa, rapeseed, cotton, tomato, potato and tobacco. Further preferably, the plant is a monocotyledonous plant. Examples of monocotyledonous plants include sugarcane. More preferably the plant is a cereal. Examples of cereals include rice, maize, wheat, barley, millet, rye, triticale, sorghum and oats.

[0409] The invention also extends to harvestable parts of a plant such as, but not limited to seeds, leaves, fruits, flowers, stems, roots, rhizomes, tubers and bulbs. The invention furthermore relates to products derived, preferably directly derived, from a harvestable part of such a plant, such as dry pellets or powders, oil, fat and fatty acids, starch or proteins.

[0410] According to a preferred feature of the invention, the modulated expression is increased expression. Methods for increasing expression of nucleic acids or genes, or gene products, are well documented in the art and examples are provided in the definitions section.

[0411] As mentioned above, a preferred method for modulating (preferably, increasing) expression of a nucleic acid encoding a CKI polypeptide is by introducing and expressing in a plant a nucleic acid encoding a CKI polypeptide; however the effects of performing the method, i.e. enhancing yield-related traits may also be achieved using other well known techniques, including but not limited to T-DNA activation tagging, TILLING, homologous recombination. A description of these techniques is provided in the definitions section.

[0412] The present invention also encompasses use of nucleic acids encoding CKI polypeptides as described herein and use of these CKI polypeptides in enhancing any of the aforementioned yield-related traits in plants.

[0413] Nucleic acids encoding CKI polypeptide described herein, or the CKI polypeptides themselves, may find use in breeding programmes in which a DNA marker is identified which may be genetically linked to a CKI polypeptide-encoding gene. The nucleic acids/genes, or the CKI polypeptides themselves may be used to define a molecular marker. This DNA or protein marker may then be used in breeding programmes to select plants having enhanced yield-related traits as defined hereinabove in the methods of the invention.

[0414] Allelic variants of a CKI polypeptide-encoding nucleic acid/gene may also find use in marker-assisted breeding programmes. Such breeding programmes sometimes require introduction of allelic variation by mutagenic treatment of the plants, using for example EMS mutagenesis; alternatively, the programme may start with a collection of allelic variants of so called “natural” origin caused unintentionally. Identification of allelic variants then takes place, for example, by PCR. This is followed by a step for selection of superior allelic variants of the sequence in question and which give increased yield. Selection is typically carried out by monitoring growth performance of plants containing different allelic variants of the sequence in question. Growth performance may be monitored in a greenhouse or in the field. Further optional steps include crossing plants in which the superior allelic variant was identified with another plant. This could be used, for example, to make a combination of interesting phenotypic features.

[0415] Nucleic acids encoding CKI polypeptides may also be used as probes for genetically and physically mapping the genes that they are a part of, and as markers for traits linked to those genes. Such information may be useful in plant breeding in order to develop lines with desired phenotypes. Such use of CKI polypeptide-encoding nucleic acids requires only a nucleic acid sequence of at least 15 nucleotides in length. The CKI polypeptide-encoding nucleic acids may be used as restriction fragment length polymorphism (RFLP) markers. Southern blots (Sambrook J, Fritsch E F and Maniatis T (1989) Molecular Cloning, A Laboratory Manual) of restriction-digested plant genomic DNA may be probed with the CKI-encoding nucleic acids. The resulting banding patterns may then be subjected to genetic analyses using computer programs such as MapMaker (Lander et al. (1987) Genomics 1: 174-181) in order to construct a genetic map. In addition, the nucleic acids may be used to probe Southern blots containing restriction endonuclease-treated genomic DNAs of a set of individuals representing parent and progeny of a defined genetic cross. Segregation of the DNA polymorphisms is noted and used to calculate the position of the CKI polypeptide-encoding nucleic acid in the genetic map previously obtained using this population (Botstein et al. (1980) Am. J. Hum. Genet. 32:314-331).

[0416] The production and use of plant gene-derived probes for use in genetic mapping is described in Bernatzky and Tanksley (1986) Plant Mol. Biol. Reporter 4: 37-41. Numerous publications describe genetic mapping of specific cDNA clones using the methodology outlined above or variations thereof. For example, F2 intercross populations, backcross populations, randomly mated populations, near isogenic lines, and other sets of individuals may be used for mapping. Such methodologies are well known to those skilled in the art.

[0417] The nucleic acid probes may also be used for physical mapping (i.e., placement of sequences on physical maps; see Hoheisel et al. In: Non-mammalian Genomic Analysis: A Practical Guide, Academic press 1996, pp. 319-346, and references cited therein).

[0418] In another embodiment, the nucleic acid probes may be used in direct fluorescence in situ hybridisation (FISH) mapping (Trask (1991) Trends Genet. 7:149-154). Although current methods of FISH mapping favour use of large clones (several kb to several hundred kb; see Laan et al. (1995) Genome Res. 5:13-20), improvements in sensitivity may allow performance of FISH mapping using shorter probes.

[0419] A variety of nucleic acid amplification-based methods for genetic and physical mapping may be carried out using the nucleic acids. Examples include allele-specific amplification (Kazazian (1989) J. Lab. Clin. Med 11:95-96), polymorphism of PCR-amplified fragments (CAPS; Sheffield et al. (1993) Genomics 16:325-332), allele-specific ligation (Landegren et al. (1988) Science 241:1077-1080), nucleotide extension reactions (Sokolov (1990) Nucleic Acid Res. 18:3671), Radiation Hybrid Mapping (Walter et al. (1997) Nat. Genet. 7:22-28) and Happy Mapping (Dear and Cook (1989) Nucleic Acid Res. 17:6795-6807). For these methods, the sequence of a nucleic acid is used to design and produce primer pairs for use in the amplification reaction or in primer extension reactions. The design of such primers is well known to those skilled in the art. In methods employing PCR-based genetic mapping, it may be necessary to identify DNA sequence differences between the parents of the mapping cross in the region corresponding to the instant nucleic acid sequence. This, however, is generally not necessary for mapping methods.

[0420] The methods according to the present invention result in plants having enhanced yield-related traits, as described hereinbefore. These traits may also be combined with other economically advantageous traits, such as further yield-enhancing traits, tolerance to other abiotic and biotic stresses, traits modifying various architectural features and/or biochemical and/or physiological features.

### IV. Plant Homeodomain Finger-Homeodomain (PHDf-HD) Polypeptide

[0421] Surprisingly, it has now been found that modulating, preferably increasing, expression in a plant of a nucleic acid sequence encoding a PHDf-HD polypeptide gives plants having enhanced yield-related traits, preferably enhanced seed yield-related traits, relative to control plants. According to a first embodiment, the present invention provides a method for enhancing yield-related traits, preferably enhancing seed yield-related traits, in plants relative to control plants, comprising modulating, preferably increasing, expression in a plant of a nucleic acid sequence encoding a PHDf-HD polypeptide.

[0422] A preferred method for modulating, preferably increasing, expression of a nucleic acid sequence encoding a PHDf-HD polypeptide is by introducing and expressing in a plant a nucleic acid sequence encoding a PHDf-HD polypeptide.

[0423] Any reference hereinafter to a “protein useful in the methods of the invention” is taken to mean a PHDf-HD polypeptide as defined herein. Any reference hereinafter to a “nucleic acid sequence useful in the methods of the invention” is taken to mean a nucleic acid sequence capable of encoding such a PHDf-HD polypeptide. The nucleic acid sequence to be introduced into a plant (and therefore useful in performing the methods of the invention) is any nucleic acid sequence encoding the type of polypeptide, which will now be described, hereafter also named “PHDf-HD nucleic acid sequence” or “PHDf-HD gene”.

[0424] A “PHDf-HD polypeptide” as defined herein refers to any polypeptide comprising: (i) a domain having at least 25%, 30%, 35%, 40%, 45%, 50%, 55%, 60%, 65%, 70%, 75%, 80%, 85%, 90%, 95%, 98%, 99% or more amino acid sequence identity to a leucine zipper/plant homeodomain finger (ZIP/PHDf) domain as represented by SEQ ID NO: 233; and (ii) a domain having at least 25%, 30%, 35%, 40%, 45%, 50%, 55%, 60%, 65%, 70%, 75%, 80%, 85%, 90%, 95%, 98%, 99% or more amino acid sequence identity to a homeodomain (HD) as represented by SEQ ID NO: 234.

[0425] Alternatively or additionally, a “PHDf-HD polypeptide” as defined herein refers to any polypeptide comprising: (i) a PHD domain as represented by PFAM00628; and (ii) an HD as represented by PFAM00046.

[0426] Alternatively or additionally, a “PHDf-HD polypeptide” as defined herein refers to any polypeptide sequence which when used in the construction of a HD phylogenetic tree, such as the one depicted in FIG. 13, clusters with the PHDf-HD group of polypeptides comprising the polypeptide sequence as represented by SEQ ID NO: 180, rather than with any other HD group.

[0427] Alternatively or additionally, a “PHDf-HD polypeptide” as defined herein refers to any polypeptide having in increasing order of preference at least 25%, 30%, 35%, 40%, 45%, 50%, 55%, 60%, 65%, 70%, 75%, 80%, 85%, 90%, 95%, 98%, 99% or more amino acid sequence identity to the PHDf-HD polypeptide as represented by SEQ ID NO: 180 or to any of the polypeptide sequences given in Table D1 herein.

[0428] The term “domain” and “motif” is defined in the “definitions” section herein. Specialist databases exist for the identification of domains, for example, SMART (Schultz et al. (1998) Proc. Natl. Acad. Sci. USA 95, 5857-5864; Letunic et al. (2002) Nucleic Acids Res 30, 242-244, InterPro (Mulder et al., (2003) Nucl. Acids. Res. 31, 315-318, Prosite (Bucher and Bairoch (1994), A generalized profile syntax for biomolecular sequences motifs and its function in automatic sequence interpretation. (In) ISMB-94; Proceedings 2nd International Conference on Intelligent Systems for Molecular Biology. Altman R., Brutlag D., Karp P., Lathrop R., Searls D., Eds., pp53-61, AAAI Press, Menlo Park; Hulo et al., Nucl. Acids. Res. 32:D134-D137, (2004), or Pfam (Bateman et al., Nucleic Acids Research 30(1): 276-280 (2002). A set of tools for in silico analysis of protein sequences is available on the ExPASy proteomics server (Swiss Institute of Bioinformatics (Gasteiger et al., ExPASy: the proteomics server for in-depth protein knowledge and analysis, Nucleic Acids Res. 31:3784-3788(2003)). Domains may also be identified using routine techniques, such as by sequence alignment. Analysis of the polypeptide sequence of SEQ ID NO: 180 is presented below in Examples 30 and 32 herein. For example, a PHDf-HD polypeptide as represented by SEQ ID NO: 180 comprises a PHD finger with a Pfam entry PF00628, and a HD with Pfam entry PF00046.

[0429] Methods for the alignment of sequences for comparison are well known in the art, such methods include GAP, BESTFIT, BLAST, FASTA and TFASTA. GAP uses the algorithm of Needleman and Wunsch ((1970) J Mol Biol 48: 443-453) to find the global (i.e. spanning the complete sequences) alignment of two sequences that maximizes the number of matches and minimizes the number of gaps. The BLAST algorithm (Altschul et al. (1990) J Mol Biol 215: 403-10) calculates percent sequence identity and performs a statistical analysis of the similarity between the two sequences. The software for performing BLAST analysis is publicly available through the National Centre for Biotechnology Information (NCBI). Homologues may readily be identified using, for example, the ClustalW multiple sequence alignment algorithm (version 1.83), with the default pairwise alignment parameters, and a scoring method in percentage. Global percentages of similarity and identity may also be determined using one of the methods available in the MatGAT software package (Campanella et al., BMC Bioinformatics. 2003 Jul. 10; 4:29. MatGAT: an application that generates similarity/identity matrices using protein or DNA sequences.). Minor manual editing may be performed to optimise alignment between conserved motifs, as would be apparent to a person skilled in the art. Furthermore, instead of using full-length sequences for the identification of homologues, specific domains may also be used. The sequence identity values may be determined over the entire nucleic acid sequence or polypeptide sequence or over selected domains or conserved motif(s), using the programs mentioned above using the default parameters. Example 31 herein describes in Table D2 the percentage identity between the ZIP/PHDf as represented by SEQ ID NO: 233 and ZIP/PHDf of the PHDf-HD polypeptides listed in Table D1, and in Table D3 the percentage identity between the HD as represented by SEQ ID NO: 234 and the HD of the PHDf-HD polypeptides listed in Table D1 of Example 29.

[0430] Furthermore, amino acid sequences enriched in basic (Lys and Arg) or acidic (Glu and Asp) amino acids, respectively called basic and acidic stretches, may also readily be identified simply by eye inspection (FIG. 17). Alternatively primary amino acid composition (in %) may be calculated to determine if a polypeptide domain is rich in specific amino acids using software programs from the ExPASy server, in particular the ProtParam tool (Gasteiger E et al. (2003) ExPASy: the proteomics server for in-depth protein knowledge and analysis. Nucleic Acids Res 31:3784-3788). The composition of the protein of interest may then be compared to the average amino acid composition (in %) in the Swiss-Prot Protein Sequence data bank.

[0431] Coiled coils are important to identify for protein-protein interactions, such as oligomerization, either of identical proteins, of proteins of the same family, or of unrelated proteins. A PHDf-HD polypeptide presents at least one predicted coiled coil region. Recently much progress has been made in computational prediction of coiled coils from sequence data. Among algorithms well known to a person skilled in the art are available at the ExPASy Proteomics tools COILS, PAIRCOIL, PAIRCOIL2, MULTICOIL, or MARCOIL, hosted by the Swiss Institute for Bioinformatics. In Example 33 and FIG. 16, are shown respectively the numerical and graphical results of SEQ ID NO: 180 as produced by the COILS algorithm analysis. Two N-terminal predicted coiled coil domains are identified in a PHDf-HD polypeptide sequence as represented by SEQ ID NO: 180, with a strong probability. A C-terminal coiled coil is also predicted, with a lower probability.

[0432] The task of protein subcellular localisation prediction is important and well studied. Knowing a protein's localisation helps elucidate its function. Experimental methods for protein localization range from immunolocalization to tagging of proteins using green fluorescent protein (GFP). Such methods are accurate although labor-intensive compared with computational methods. Recently much progress has been made in computational prediction of protein localisation from sequence data. Among algorithms well known to a person skilled in the art are available at the ExPASy Proteomics tools hosted by the Swiss Institute for Bioinformatics, for example, PSort, TargetP, ChloroP, LocTree, Predotar, LipoP, MITOPROT, PATS, PTS1, SignaIP and others. The identification of subcellular localisation of the polypeptide of the invention is shown in Example 34. In particular SEQ ID NO: 180 of the present invention is assigned to the nuclear compartment of eucaryotic cells.

[0433] Furthermore, PHDf-HD polypeptides useful in the methods of the present invention (at least in their native form) typically, but not necessarily, have transcriptional regulatory activity and capacity to interact with other proteins. Therefore, PHDf-HD polypeptides with reduced transcriptional regulatory activity, without transcriptional regulatory activity, with reduced protein-protein interaction capacity, or with no protein-protein interaction capacity, may equally be useful in the methods of the present invention. DNA-binding activity and protein-protein interactions may readily be determined in vitro or in vivo using techniques well known in the art (for example in Current Protocols in Molecular Biology, Volumes 1 and 2, Ausubel et al. (1994), Current Protocols). To determine the DNA binding activity of PHDf-HD polypeptides, several assays are available, such as DNA binding gel-shift assays (or gel retardation assays; Korfhage et al. (1994) Plant C 6: 695-708), in vitro DNA binding assays (Schindler et al. (1993) Plant J 4(1): 137-150), or transcriptional activation of PHDf-HD polypeptides in yeast, animal and plant cells (Halbach et al. (2000) Nucleic Acid Res 28(18): 3542-3550). Specific DNA binding sequences can be determined using the random oligonucleotide selection technique (Viola & Gonzalez (May 26, 2007) Biochemistry).

[0434] The present invention is illustrated by transforming plants with the nucleic acid sequence represented by SEQ ID NO: 179, encoding the polypeptide sequence of SEQ ID NO: 180. However, performance of the invention is not restricted to these sequences; the methods of the invention may advantageously be performed using any nucleic acid sequence encoding PHDf-HD or PHDf-HD polypeptide as defined herein.

[0435] Examples of nucleic acid sequences encoding PHDf-HD polypeptides are given in Table D1 of Example 29 herein. Such nucleic acid sequences are useful in performing the methods of the invention. The polypeptide sequences given in Table D1 of Example 29 are example sequences of orthologues and paralogues of the PHDf-HD polypeptide represented by SEQ ID NO: 180, the terms “orthologues” and “paralogues” being as defined herein. Further orthologues and paralogues may readily be identified by performing a so-called reciprocal blast search. Typically, this involves a first BLAST involving BLASTing a query sequence (for example using any of the sequences listed in Table D1 of Example 29) against any sequence database, such as the publicly available NCBI database. BLASTN or TBLASTX (using standard default values) are generally used when starting from a nucleotide sequence, and BLASTP or TBLASTN (using standard default values) when starting from a protein sequence. The BLAST results may optionally be filtered. The full-length sequences of either the filtered results or non-filtered results are then BLASTed back (second BLAST) against sequences from the organism from which the query sequence is derived (where the query sequence is SEQ ID NO: 179 or SEQ ID NO: 180, the second BLAST would therefore be against rice sequences). The results of the first and second BLASTs are then compared. A paralogue is identified if a high-ranking hit from the first blast is from the same species as from which the query sequence is derived, a BLAST back then ideally results in the query sequence amongst the highest hits; an orthologue is identified if a high-ranking hit in the first BLAST is not from the same species as from which the query sequence is derived, and preferably results upon BLAST back in the query sequence being among the highest hits.

[0436] High-ranking hits are those having a low E-value. The lower the E-value, the more significant the score (or in other words the lower the chance that the hit was found by chance). Computation of the E-value is well known in the art. In addition to E-values, comparisons are also scored by percentage identity. Percentage identity refers to the number of identical nucleotides (or amino acids) between the two compared nucleic acid (or polypeptide) sequences over a particular length. In the case of large families, ClustalW may be used, followed by a neighbour joining tree, to help visualize clustering of related genes and to identify orthologues and paralogues. Any sequence clustering within the group comprising SEQ ID NO: 180 (encircled in FIG. 29) would be considered to fall within the aforementioned definition of a PHDf-HD polypeptide, and would be considered suitable for use in the methods of the invention.

[0437] Nucleic acid variants may also be useful in practising the methods of the invention. Examples of such variants include nucleic acid sequences encoding homologues and derivatives of any one of the polypeptide sequences given in Table D1 of Example 29, the terms “homologue” and “derivative” being as defined herein. Also useful in the methods of the invention are nucleic acid sequences encoding homologues and derivatives of orthologues or paralogues of any one of the polypeptide sequences given in Table D1 of Example 29. Homologues and derivatives useful in the methods of the present invention have substantially the same biological and functional activity as the unmodified protein from which they are derived.

[0438] Further nucleic acid variants useful in practising the methods of the invention include portions of nucleic acid sequences encoding PHDf-HD polypeptides, nucleic acid sequences hybridising to nucleic acid sequences encoding PHDf-HD polypeptides, splice variants of nucleic acid sequences encoding PHDf-HD polypeptides, allelic variants of nucleic acid sequences encoding PHDf-HD polypeptides and variants of nucleic acid sequences encoding PHDf-HD polypeptides obtained by gene shuffling. The terms hybridising sequence, splice variant, allelic variant and gene shuffling are as described herein.

[0439] Nucleic acid sequences encoding PHDf-HD polypeptides need not be full-length nucleic acid sequences, since performance of the methods of the invention does not rely on the use of full-length nucleic acid sequences. According to the present invention, there is provided a method for enhancing yield-related traits, preferably enhancing seed yield-related traits, in plants, comprising introducing and expressing in a plant a portion of any one of the nucleic acid sequences given in Table D1 of Example 29, or a portion of a nucleic acid sequence encoding an orthologue, paralogue or homologue of any of the polypeptide sequences given in Table D1 of Example 29.

[0440] A portion of a nucleic acid sequence may be prepared, for example, by making one or more deletions to the nucleic acid sequence. The portions may be used in isolated form or they may be fused to other coding (or non-coding) sequences in order to, for example, produce a protein that combines several activities. When fused to other coding sequences, the resultant polypeptide produced upon translation may be bigger than that predicted for the protein portion.

[0441] Portions useful in the methods of the invention, encode a PHDf-HD polypeptide as defined herein, and have substantially the same biological activity as the polypeptide sequences given in Table D1 of Example 29. Preferably, the portion is a portion of any one of the nucleic acid sequences given in Table D1 of Example 29, or is a portion of a nucleic acid sequence encoding an orthologue or paralogue of any one of the polypeptide sequences given in Table D1 of Example 29. Preferably the portion is, in increasing order of preference at least 600, 800, 1000, 1200, 1400, 1600, 1800, 2000, 2200, 2400, 2600, 2800 consecutive nucleotides in length, the consecutive nucleotides being of any one of the nucleic acid sequences given in Table D1 of Example 29, or of a nucleic acid sequence encoding an orthologue or paralogue of any one of the polypeptide sequences given in Table D1 of Example 29. Most preferably the portion is a portion of the nucleic acid sequence of SEQ ID NO: 179. Preferably, the portion encodes a polypeptide sequence which when used in the construction of a HD phylogenetic tree, such as the one depicted in FIG. 13, clusters with the group of PHDf-HD polypeptides comprising the polypeptide sequence represented by SEQ ID NO: 180 rather than with any other HD group.

[0442] Another nucleic acid sequence variant useful in the methods of the invention is a nucleic acid sequence capable of hybridising, under reduced stringency conditions, preferably under stringent conditions, with a nucleic acid sequence encoding a PHDf-HD polypeptide as defined herein, or with a portion as defined herein.

[0443] According to the present invention, there is provided a method for enhancing yield-related traits in plants, preferably enhancing seed yield-related traits, comprising introducing and expressing in a plant a nucleic acid sequence capable of hybridizing to any one of the nucleic acid sequences given in Table D1 of Example 29, or comprising introducing and expressing in a plant a nucleic acid sequence capable of hybridising to a nucleic acid sequence encoding an orthologue, paralogue or homologue of any of the nucleic acid sequences given in Table D1 of Example 29.

[0444] Hybridising sequences useful in the methods of the invention encode a PHDf-HD polypeptide as defined herein, and have substantially the same biological activity as the polypeptide sequences given in Table D1 of Example 29. Preferably, the hybridising sequence is capable of hybridising to any one of the nucleic acid sequences given in Table D1 of Example 29, or to a portion of any of these sequences, a portion being as defined above, or wherein the hybridising sequence is capable of hybridising to a nucleic acid sequence encoding an orthologue or paralogue of any one of the polypeptide sequences given in Table D1 of Example 29. Most preferably, the hybridising sequence is capable of hybridising to a nucleic acid sequence as represented by SEQ ID NO: 179 or to a portion thereof.

[0445] Preferably, the hybridising sequence encodes a polypeptide sequence which when used in the construction of a HD phylogenetic tree, such as the one depicted in FIG. 13, clusters with the group of PHDf-HD polypeptides comprising the polypeptide sequence represented by SEQ ID NO: 180 rather than with any other HD group.

[0446] Another nucleic acid sequence variant useful in the methods of the invention is a splice variant encoding a PHDf-HD polypeptide as defined hereinabove, a splice variant being as defined herein.

[0447] According to the present invention, there is provided a method for enhancing yield-related traits in plants, preferably enhancing seed yield-related traits, comprising introducing and expressing in a plant a splice variant of any one of the nucleic acid sequences given in Table D1 of Example 29, or a splice variant of a nucleic acid sequence encoding an orthologue, paralogue or homologue of any of the polypeptide sequences given in Table D1 of Example 29.

[0448] Preferred splice variants are splice variants of a nucleic acid sequence represented by SEQ ID NO: 179, or a splice variant of a nucleic acid sequence encoding an orthologue or paralogue of SEQ ID NO: 180. Preferably, the polypeptide sequence encoded by the splice variant, when used in the construction of a HD phylogenetic tree, such as the one depicted in FIG. 13, clusters with the group of PHDf-HD polypeptides comprising the polypeptide sequence represented by SEQ ID NO: 180 rather than with any other HD group.

[0449] Another nucleic acid sequence variant useful in performing the methods of the invention is an allelic variant of a nucleic acid sequence encoding a PHDf-HD polypeptide as defined hereinabove, an allelic variant being as defined herein.

[0450] According to the present invention, there is provided a method for enhancing yield-related traits in plants, preferably enhancing seed yield-related traits, comprising introducing and expressing in a plant an allelic variant of any one of the nucleic acid sequences given in Table D1 of Example 29, or comprising introducing and expressing in a plant an allelic variant of a nucleic acid sequence encoding an orthologue, paralogue or homologue of any of the polypeptide sequences given in Table D1 of Example 29.

[0451] The allelic variants useful in the methods of the present invention have substantially the same biological activity as the polypeptide of SEQ ID NO: 180 and any of the polypeptide sequences depicted in Table D1 of Example 29. Allelic variants exist in nature, and encompassed within the methods of the present invention is the use of these natural alleles. Preferably, the allelic variant is an allelic variant of SEQ ID NO: 179 or an allelic variant of a nucleic acid sequence encoding an orthologue or paralogue of SEQ ID NO: 180. Preferably, the polypeptide sequence encoded by the allelic variant, when used in the construction of a HD phylogenetic tree, such as the one depicted in FIG. 13, clusters with the PHDf-HD polypeptides comprising the polypeptide sequence represented by SEQ ID NO: 180 rather than with any other HD group.

[0452] Gene shuffling or directed evolution may also be used to generate variants of nucleic acid sequences encoding PHDf-HD polypeptides as defined above; the term “gene shuffling” being as defined herein.

[0453] According to the present invention, there is provided a method for enhancing yield-related traits in plants, preferably enhancing seed yield-related traits, comprising introducing and expressing in a plant a variant of any one of the nucleic acid sequences given in Table D1 of Example 29, or comprising introducing and expressing in a plant a variant of a nucleic acid sequence encoding an orthologue, paralogue or homologue of any of the polypeptide sequences given in Table D1 of Example 29, which variant nucleic acid sequence is obtained by gene shuffling.

[0454] Advantageously, the present invention provides hitherto unknown PHDf-HD nucleic acid and polypeptide sequences.

[0455] According to a further embodiment of the present invention, there is provided an isolated nucleic acid molecule comprising:
[0456] (i) a nucleic acid represented by SEQ ID NO: 242;
[0457] (ii) a nucleic acid or fragment thereof that is complementary to SEQ ID NO: 242;
[0458] (iii) a nucleic acid encoding an JMJC polypeptide having, in increasing order of preference, at least 70%, 75%, 80%, 85%, 90%, 95%, 96%, 97%, 98%, 99% or more sequence identity to the amino acid sequence given in SEQ ID NO: 243;
[0459] (iv) a nucleic acid capable of hybridizing under stringent conditions to any one of the nucleic acids given in (i), (ii) or (iii) above.

[0460] According to a further embodiment of the present invention, there is therefore provided an isolated polypeptide comprising:
[0461] (i) a nucleic acid represented by SEQ ID NO: 242;
[0462] (ii) a nucleic acid or fragment thereof that is complementary to SEQ ID NO: 242;
[0463] (iii) a nucleic acid encoding an JMJC polypeptide having, in increasing order of preference, at least 70%, 75%, 80%, 85%, 90%, 95%, 96%, 97%, 98%, 99% or more sequence identity to the amino acid sequence given in SEQ ID NO: 243;
[0464] (iv) a nucleic acid capable of hybridizing under stringent conditions to any one of the nucleic acids given in (i), (ii) or (iii) above.

[0465] Preferably, the polypeptide sequence encoded by the variant nucleic acid sequence obtained by gene shuffling, when used in the construction of a HD phylogenetic tree, such as the one depicted in FIG. 13, clusters with the group of PHDf-HD polypeptides comprising the polypeptide sequence represented by SEQ ID NO: 180 rather than with any other HD group.

[0466] Furthermore, nucleic acid sequence variants may also be obtained by site-directed mutagenesis. Several methods are available to achieve site-directed mutagenesis, the most common being PCR based methods (Current Protocols in Molecular Biology. Wiley Eds.).

[0467] Nucleic acid sequences encoding PHDf-HD polypeptides may be derived from any natural or artificial source. The nucleic acid sequence may be modified from its native form in composition and/or genomic environment through deliberate human manipulation. Preferably the PHDf-HD polypeptide-encoding nucleic acid sequence is from a plant, further preferably from a monocotyledonous plant, more preferably from the family Poaceae, most preferably the nucleic acid sequence is from Oryza sativa.

[0468] Performance of the methods of the invention gives plants having enhanced yield-related traits. In particular performance of the methods of the invention gives plants having increased yield, especially increased seed yield relative to control plants. The terms “yield” and “seed yield” are described in more detail in the “definitions” section herein.

[0469] Reference herein to enhanced yield-related traits is taken to mean an increase in biomass (weight) of one or more parts of a plant, which may include aboveground (harvestable) parts and/or (harvestable) parts below ground. In particular, such harvestable parts are seeds, and performance of the methods of the invention results in plants having increased seed yield relative to the seed yield of control plants.

[0470] Taking corn as an example, a yield increase may be manifested as one or more of the following: increase in the number of plants established per hectare or acre, an increase in the number of ears per plant, an increase in the number of rows, number of kernels per row, kernel weight, thousand kernel weight, ear length/diameter, increase in the seed filling rate (which is the number of filled seeds divided by the total number of seeds and multiplied by 100), among others. Taking rice as an example, a yield increase may manifest itself as an increase in one or more of the following: number of plants per hectare or acre, number of panicles per plant, number of spikelets per panicle, number of flowers (florets) per panicle (which is expressed as a ratio of the number of filled seeds over the number of primary panicles), increase in the seed filling rate (which is the number of filled seeds divided by the total number of seeds and multiplied by 100), increase in thousand kernel weight, among others.

[0471] The present invention provides a method for increasing yield, especially seed yield of plants, relative to control plants, which method comprises modulating, preferably increasing, expression in a plant of a nucleic acid sequence encoding a PHDf-HD polypeptide as defined herein.

[0472] Since the transgenic plants according to the present invention have enhanced yield-related traits, preferably enhanced seed yield-related traits, it is likely that these plants exhibit an increased growth rate (during at least part of their life cycle), relative to the growth rate of control plants at a corresponding stage in their life cycle.

[0473] The increased growth rate may be specific to one or more parts of a plant (including seeds), or may be throughout substantially the whole plant. Plants having an increased growth rate may have a shorter life cycle. The life cycle of a plant may be taken to mean the time needed to grow from a dry mature seed up to the stage where the plant has produced dry mature seeds, similar to the starting material. This life cycle may be influenced by factors such as early vigour, growth rate, greenness index, flowering time and speed of seed maturation. The increase in growth rate may take place at one or more stages in the life cycle of a plant or during substantially the whole plant life cycle. Increased growth rate during the early stages in the life cycle of a plant may reflect enhanced (early) vigour. The increase in growth rate may alter the harvest cycle of a plant allowing plants to be sown later and/or harvested sooner than would otherwise be possible (a similar effect may be obtained with earlier flowering time). If the growth rate is sufficiently increased, it may allow for the further sowing of seeds of the same plant species (for example sowing and harvesting of rice plants followed by sowing and harvesting of further rice plants all within one conventional growing period). Similarly, if the growth rate is sufficiently increased, it may allow for the further sowing of seeds of different plants species (for example the sowing and harvesting of corn plants followed by, for example, the sowing and optional harvesting of soybean, potato or any other suitable plant). Harvesting additional times from the same rootstock in the case of some crop plants may also be possible. Altering the harvest cycle of a plant may lead to an increase in annual biomass production per acre (due to an increase in the number of times (say in a year) that any particular plant may be grown and harvested). An increase in growth rate may also allow for the cultivation of transgenic plants in a wider geographical area than their wild-type counterparts, since the territorial limitations for growing a crop are often determined by adverse environmental conditions either at the time of planting (early season) or at the time of harvesting (late season). Such adverse conditions may be avoided if the harvest cycle is shortened. The growth rate may be determined by deriving various parameters from growth curves, such parameters may be: T-Mid (the time taken for plants to reach 50% of their maximal size) and T-90 (time taken for plants to reach 90% of their maximal size), amongst others. The growth rates defined herein is not taken to mean earlier flowering.

[0474] According to a preferred feature of the present invention, performance of the methods of the invention gives plants having an increased growth rate relative to control plants. Therefore, according to the present invention, there is provided a method for increasing the growth rate of plants, which method comprises modulating, preferably increasing, expression in a plant of a nucleic acid sequence encoding a PHDf-HD polypeptide as defined herein.

[0475] Enhanced yield-related traits, preferably enhanced seed yield-related traits, occur whether the plant is under non-stress conditions or whether the plant is exposed to various stresses compared to control plants grown under comparable conditions. Plants typically respond to exposure to stress by growing more slowly. In conditions of severe stress, the plant may even stop growing altogether. Mild stress on the other hand is defined herein as being any stress to which a plant is exposed which does not result in the plant ceasing to grow altogether without the capacity to resume growth. Mild stress in the sense of the invention leads to a reduction in the growth of the stressed plants of less than 40%, 35% or 30%, preferably less than 25%, 20% or 15%, more preferably less than 14%, 13%, 12%, 11% or 10% or less in comparison to the control plant under non-stress conditions. Due to advances in agricultural practices (irrigation, fertilization, pesticide treatments) severe stresses are not often encountered in cultivated crop plants. As a consequence, the compromised growth induced by mild stress is often an undesirable feature for agriculture. Mild stresses are the everyday biotic and/or abiotic (environmental) stresses to which a plant is exposed. Abiotic stresses may be due to drought or excess water, anaerobic stress, salt stress, chemical toxicity, oxidative stress and hot, cold or freezing temperatures. The abiotic stress may be an osmotic stress caused by a water stress (particularly due to drought), salt stress, oxidative stress or an ionic stress. Biotic stresses are typically those stresses caused by pathogens, such as bacteria, viruses, fungi, nematodes, and insects. The term “non-stress” conditions as used herein are those environmental conditions that allow optimal growth of plants. Persons skilled in the art are aware of normal soil conditions and climatic conditions for a given location.

[0476] Performance of the methods of the invention gives plants grown under non-stress conditions or under mild drought conditions having enhanced yield-related traits, preferably enhanced seed yield-related traits, relative to control plants grown under comparable conditions. Therefore, according to the present invention, there is provided a method for enhancing yield-related traits in plants grown under non-stress conditions or under mild drought conditions, which method comprises modulating, preferably increasing, expression in a plant of a nucleic acid sequence encoding a PHDf-HD polypeptide. Plants with optimal growth conditions, cultivated under non-stress conditions, typically yield in increasing order of preference at least 90%, 87%, 85%, 83%, 80%, 77% or 75% of the average production of such plant in a given environment. Average production may be calculated on harvest and/or season basis on a given location. Persons skilled in the art are aware of average yield productions of a crop.

[0477] Performance of the methods according to the present invention results in plants grown under abiotic stress conditions having enhanced yield-related traits, preferably enhanced seed yield-related traits, relative to control plants grown under comparable stress conditions. As reported in Wang et al. (Planta (2003) 218: 1-14), abiotic stress leads to a series of morphological, physiological, biochemical and molecular changes that adversely affect plant growth and productivity. Drought, salinity, extreme temperatures and oxidative stress are known to be interconnected and may induce growth and cellular damage through similar mechanisms. Rabbani et al. (Plant Physiol (2003) 133: 1755-1767) describes a particularly high degree of “cross talk” between drought stress and high-salinity stress. For example, drought and/or salinisation are manifested primarily as osmotic stress, resulting in the disruption of homeostasis and ion distribution in the cell. Oxidative stress, which frequently accompanies high or low temperature, salinity or drought stress, may cause denaturing of functional and structural proteins. As a consequence, these diverse environmental stresses often activate similar cell signalling pathways and cellular responses, such as the production of stress proteins, up-regulation of anti-oxidants, accumulation of compatible solutes and growth arrest. Since diverse environmental stresses activate similar pathways, the exemplification of the present invention with drought stress should not be seen as a limitation to drought stress, but more as a screen to indicate the involvement of PHDf-HD polypeptides as defined above, in enhancing yield-related traits, preferably enhancing seed yield-related traits, relative to control plants grown in comparable stress conditions, in abiotic stresses in general.

[0478] The term “abiotic stress” as defined herein is taken to mean any one or more of: water stress (due to drought or excess water), anaerobic stress, salt stress, temperature stress (due to hot, cold or freezing temperatures), chemical toxicity stress and oxidative stress. According to one aspect of the invention, the abiotic stress is an osmotic stress, selected from water stress, salt stress, oxidative stress and ionic stress. Preferably, the water stress is drought stress. The term salt stress is not restricted to common salt (NaCl), but may be any stress caused by one or more of: NaCl, KCl, LiCl, MgCl2, CaCl2, amongst others.

[0479] Performance of the methods of the invention gives plants having enhanced yield-related traits, preferably enhanced seed yield-related traits, under abiotic stress conditions relative to control plants grown in comparable stress conditions. Therefore, according to the present invention, there is provided a method for enhancing yield-related traits, preferably enhancing seed yield-related traits, in plants grown under abiotic stress conditions, which method comprises modulating, preferably increasing, expression in a plant of a nucleic acid sequence encoding a PHDf-HD polypeptide. According to one aspect of the invention, the abiotic stress is an osmotic stress, selected from one or more of the following: water stress, salt stress, oxidative stress and ionic stress.

[0480] Another example of abiotic environmental stress is the reduced availability of one or more nutrients that need to be assimilated by the plants for growth and development. Because of the strong influence of nutrition utilization efficiency on plant yield and product quality, a huge amount of fertilizer is poured onto fields to optimize plant growth and quality. Productivity of plants ordinarily is limited by three primary nutrients, phosphorous, potassium and nitrogen, which is usually the rate-limiting element in plant growth of these three. Therefore the major nutritional element required for plant growth is nitrogen (N). It is a constituent of numerous important compounds found in living cells, including amino acids, proteins (enzymes), nucleic acids, and chlorophyll. 1.5% to 2% of plant dry matter is nitrogen and approximately 16% of total plant protein. Thus, nitrogen availability is a major limiting factor for crop plant growth and production (Frink et al. (1999) Proc Natl Acad Sci USA 96(4): 1175-1180), and has as well a major impact on protein accumulation and amino acid composition. Therefore, of great interest are crop plants with enhanced yield-related traits, preferably enhanced seed yield-related traits, when grown under nitrogen-limiting conditions.

[0481] Performance of the methods of the invention gives plants grown under conditions of nutrient deficiency, particularly under conditions of nitrogen deficiency, enhanced yield-related traits, preferably enhanced seed yield-related traits, relative to control plants grown under comparable conditions. Therefore, according to the present invention, there is provided a method for enhancing yield-related traits, preferably enhancing seed yield-related traits, in plants grown under conditions of nutrient deficiency, which method comprises modulating, preferably increasing, expression in a plant of a nucleic acid sequence encoding a PHDf-HD polypeptide. Nutrient deficiency may result from a lack or excess of nutrients such as nitrogen, phosphates and other phosphorous-containing compounds, potassium, calcium, cadmium, magnesium, manganese, iron and boron, amongst others.

[0482] The present invention encompasses plants or parts thereof (including seeds) or cells thereof obtainable by the methods according to the present invention. The plants or parts thereof or cells thereof comprise a nucleic acid transgene encoding a PHDf-HD polypeptide as defined above.

[0483] The invention also provides genetic constructs and vectors to facilitate introduction and/or modulated, preferably increased, expression in plants of nucleic acid sequences encoding PHDf-HD polypeptides. The gene constructs may be inserted into vectors, which may be commercially available, suitable for transforming into plants and for expression of the gene of interest in the transformed cells. The invention also provides use of a gene construct as defined herein in the methods of the invention.

[0484] More specifically, the present invention provides a construct comprising:
[0485] (a) a nucleic acid sequence encoding a PHDf-HD polypeptide as defined above;
[0486] (b) one or more control sequences capable of modulating, preferably increasing, expression of the nucleic acid sequence of (a); and optionally
[0487] (c) a transcription termination sequence.

[0488] Preferably, the nucleic acid sequence encoding a PHDf-HD polypeptide is as defined above. The term “control sequence” and “termination sequence” are as defined herein.

[0489] Preferably, one of the control sequences of a construct is a constitutive promoter isolated from a plant genome. An example of a plant constitutive promoter is a GOS2 promoter, preferably a rice GOS2 promoter, more preferably a GOS2 promoter as represented by SEQ ID NO: 235.

[0490] Plants are transformed with a vector comprising any of the nucleic acid sequences described above. The skilled artisan is well aware of the genetic elements that must be present on the vector in order to successfully transform, select and propagate host cells containing the sequence of interest. The sequence of interest is operably linked to one or more control sequences (at least to a promoter).

[0491] Advantageously, any type of promoter, whether natural or synthetic, may be used to modulate, preferably increase, expression of the nucleic acid sequence. A constitutive promoter is particularly useful in the methods, preferably a constitutive promoter isolated from a plant genome. The plant constitutive promoter drives expression of a coding sequence at a level that is in all instances below that obtained under the control of a 35S CaMV promoter.

[0492] Other organ-specific promoters, for example for preferred expression in leaves, stems, tubers, meristems, seeds (embryo and/or endosperm), are useful in performing the methods of the invention. See the “Definitions” section herein for definitions of the various promoter types.

[0493] It should be clear that the applicability of the present invention is not restricted to the PHDf-HD polypeptide-encoding nucleic acid sequence represented by SEQ ID NO: 179, nor is the applicability of the invention restricted to expression of a PHDf-HD polypeptide-encoding nucleic acid sequence when driven by a constitutive promoter.

[0494] Optionally, one or more terminator sequences may be used in the construct introduced into a plant. Additional regulatory elements may include transcriptional as well as translational enhancers. Those skilled in the art will be aware of terminator and enhancer sequences that may be suitable for use in performing the invention. An intron sequence may also be added to the 5′ untranslated region (UTR) or in the coding sequence to increase the amount of the mature message that accumulates in the cytosol, as described in the definitions section. Other control sequences (besides promoter, enhancer, silencer, intron sequences, 3′UTR and/or 5′UTR regions) may be protein and/or RNA stabilizing elements. Such sequences would be known or may readily be obtained by a person skilled in the art.

[0495] The genetic constructs of the invention may further include an origin of replication sequence that is required for maintenance and/or replication in a specific cell type. One example is when a genetic construct is required to be maintained in a bacterial cell as an episomal genetic element (e.g. plasmid or cosmid molecule). Preferred origins of replication include, but are not limited to, the f1-ori and colE1.

[0496] For the detection of the successful transfer of the nucleic acid sequences as used in the methods of the invention and/or selection of transgenic plants comprising these nucleic acid sequences, it is advantageous to use marker genes (or reporter genes). Therefore, the genetic construct may optionally comprise a selectable marker gene. Selectable markers are described in more detail in the “definitions” section herein.

[0497] It is known that upon stable or transient integration of nucleic acid sequences into plant cells, only a minority of the cells takes up the foreign DNA and, if desired, integrates it into its genome, depending on the expression vector used and the transfection technique used. To identify and select these integrants, a gene coding for a selectable marker (such as the ones described above) is usually introduced into the host cells together with the gene of interest.

[0498] These markers can for example be used in mutants in which these genes are not functional by, for example, deletion by conventional methods. Furthermore, nucleic acid sequence molecules encoding a selectable marker can be introduced into a host cell on the same vector that comprises the sequence encoding the polypeptides of the invention or used in the methods of the invention, or else in a separate vector. Cells which have been stably transfected with the introduced nucleic acid sequence can be identified for example by selection (for example, cells which have integrated the selectable marker survive whereas the other cells die). The marker genes may be removed or excised from the transgenic cell once they are no longer needed. Techniques for marker gene removal are known in the art, useful techniques are described above in the definitions section.

[0499] The invention also provides a method for the production of transgenic plants having enhanced yield-related traits, preferably enhanced seed yield-related traits, relative to control plants, comprising introduction and expression in a plant of any nucleic acid sequence encoding a PHDf-HD polypeptide as defined hereinabove.

[0500] More specifically, the present invention provides a method for the production of transgenic plants having enhanced yield-related traits, preferably enhanced seed yield-related traits, relative to control plants, which method comprises:
[0501] (i) introducing and expressing in a plant, plant part, or plant cell a nucleic acid sequence encoding a PHDf-HD polypeptide, under the control of plant constitutive promoter; and
[0502] (ii) cultivating the plant cell under conditions promoting plant growth and development.

[0503] The nucleic acid sequence of (i) may be any of the nucleic acid sequences capable of encoding a PHDf-HD polypeptide as defined herein.

[0504] The nucleic acid sequence may be introduced directly into a plant cell or into the plant itself (including introduction into a tissue, organ or any other part of a plant). According to a preferred feature of the present invention, the nucleic acid sequence is preferably introduced into a plant by transformation. The term “transformation” is described in more detail in the “definitions” section herein.

[0505] The genetically modified plant cells can be regenerated via all methods with which the skilled worker is familiar. Suitable methods can be found in the abovementioned publications by S. D. Kung and R. Wu, Potrykus or Hofgen and Willmitzer.

[0506] Generally after transformation, plant cells or cell groupings are selected for the presence of one or more markers which are encoded by plant-expressible genes co-transferred with the gene of interest, following which the transformed material is regenerated into a whole plant.

[0507] To select transformed plants, the plant material obtained in the transformation is, as a rule, subjected to selective conditions so that transformed plants can be distinguished from untransformed plants. For example, the seeds obtained in the above-described manner can be planted and, after an initial growing period, subjected to a suitable selection by spraying. A further possibility consists in growing the seeds, if appropriate after sterilization, on agar plates using a suitable selection agent so that only the transformed seeds can grow into plants. Alternatively, the transformed plants are screened for the presence of a selectable marker such as the ones described above.

[0508] Following DNA transfer and regeneration, putatively transformed plants may also be evaluated, for instance using Southern analysis, for the presence of the gene of interest, copy number and/or genomic organisation. Alternatively or additionally, expression levels of the newly introduced DNA may be monitored using Northern and/or Western analysis, both techniques being well known to persons having ordinary skill in the art.

[0509] The generated transformed plants may be propagated by a variety of means, such as by clonal propagation or classical breeding techniques. For example, a first generation (or T1) transformed plant may be selfed and homozygous second-generation (or T2) transformants selected, and the T2 plants may then further be propagated through classical breeding techniques. The generated transformed organisms may take a variety of forms. For example, they may be chimeras of transformed cells and non-transformed cells; clonal transformants (e.g., all cells transformed to contain the expression cassette); grafts of transformed and untransformed tissues (e.g., in plants, a transformed rootstock grafted to an untransformed scion).

[0510] The present invention clearly extends to any plant cell or plant produced by any of the methods described herein, and to all plant parts and propagules thereof. The present invention extends further to encompass the progeny of a primary transformed or transfected cell, tissue, organ or whole plant that has been produced by any of the aforementioned methods, the only requirement being that progeny exhibit the same genotypic and/or phenotypic characteristic(s) as those produced by the parent in the methods according to the invention.

[0511] The invention also includes host cells containing an isolated nucleic acid sequence encoding a PHDf-HD polypeptide as defined hereinabove, opereably linked to a plant constitutive promoter. Preferred host cells according to the invention are plant cells. Host plants for the nucleic acid sequences or the vector used in the method according to the invention, the expression cassette or construct or vector are, in principle, advantageously all plants, which are capable of synthesizing the polypeptides used in the inventive method.

[0512] The methods of the invention are advantageously applicable to any plant. Plants that are particularly useful in the methods of the invention include all plants, which belong to the superfamily Viridiplantae, in particular monocotyledonous and dicotyledonous plants including fodder or forage legumes, ornamental plants, food crops, trees or shrubs. According to a preferred embodiment of the present invention, the plant is a crop plant. Examples of crop plants include soybean, sunflower, canola, alfalfa, rapeseed, cotton, tomato, potato and tobacco. Further preferably, the plant is a monocotyledonous plant. Examples of monocotyledonous plants include sugarcane. More preferably the plant is a cereal. Examples of cereals include rice, maize, wheat, barley, millet, rye, triticale, sorghum and oats.

[0513] The invention also extends to harvestable parts of a plant comprising an isolated nucleic acid sequence encoding a PHDf-HD (as defined hereinabove) operably linked to a plant constitutive promoter, such as, but not limited to seeds, leaves, fruits, flowers, stems, rhizomes, tubers and bulbs. The invention furthermore relates to products derived, preferably directly derived, from a harvestable part of such a plant, such as dry pellets or powders, oil, fat and fatty acids, starch or proteins.

[0514] According to a preferred feature of the invention, the modulated expression is increased expression. Methods for increasing expression of nucleic acid sequences or genes, or gene products, are well documented in the art and examples are provided in the definitions section.

[0515] As mentioned above, a preferred method for modulating, preferably increasing, expression of a nucleic acid sequence encoding a PHDf-HD polypeptide is by introducing and expressing in a plant a nucleic acid sequence encoding a PHDf-HD polypeptide; however the effects of performing the method, i.e. enhancing yield-related traits, may also be achieved using other well known techniques, including but not limited to T-DNA activation tagging, TILLING, homologous recombination. A description of these techniques is provided in the definitions section.

[0516] The present invention also encompasses use of nucleic acid sequences encoding PHDf-HD polypeptides as described herein and use of these PHDf-HD polypeptides in enhancing any of the aforementioned yield-related traits, preferably seed yield-related traits, in plants.

[0517] Nucleic acid sequences encoding PHDf-HD polypeptide described herein, or the PHDf-HD polypeptides themselves, may find use in breeding programmes in which a DNA marker is identified that may be genetically linked to a PHDf-HD polypeptide-encoding gene. The genes/nucleic acid sequences, or the PHDf-HD polypeptides themselves may be used to define a molecular marker. This DNA or protein marker may then be used in breeding programmes to select plants having enhanced yield-related traits, preferably enhanced seed yield-related traits, as defined hereinabove in the methods of the invention.

[0518] Allelic variants of a gene/nucleic acid sequence encoding a PHDf-HD polypeptide may also find use in marker-assisted breeding programmes. Such breeding programmes sometimes require introduction of allelic variation by mutagenic treatment of the plants, using for example EMS mutagenesis; alternatively, the programme may start with a collection of allelic variants of so called “natural” origin caused unintentionally. Identification of allelic variants then takes place, for example, by PCR. This is followed by a step for selection of superior allelic variants of the sequence in question and which give enhanced yield-related traits. Selection is typically carried out by monitoring growth performance of plants containing different allelic variants of the sequence in question. Growth performance may be monitored in a greenhouse or in the field. Further optional steps include crossing plants in which the superior allelic variant was identified with another plant. This could be used, for example, to make a combination of interesting phenotypic features.

[0519] Nucleic acid sequences encoding PHDf-HD polypeptides may also be used as probes for genetically and physically mapping the genes that they are a part of, and as markers for traits linked to those genes. Such information may be useful in plant breeding in order to develop lines with desired phenotypes. Such use of nucleic acid sequences encoding a PHDf-HD polypeptide requires only a nucleic acid sequence of at least 15 nucleotides in length. The nucleic acid sequences encoding a PHDf-HD polypeptide may be used as restriction fragment length polymorphism (RFLP) markers. Southern blots (Sambrook J, Fritsch E F and Maniatis T (1989) Molecular Cloning, A Laboratory Manual) of restriction-digested plant genomic DNA may be probed with the nucleic acid sequences encoding a PHDf-HD polypeptide. The resulting banding patterns may then be subjected to genetic analyses using computer programs such as MapMaker (Lander et al. (1987) Genomics 1: 174-181) in order to construct a genetic map. In addition, the nucleic acid sequences may be used to probe Southern blots containing restriction endonuclease-treated genomic DNAs of a set of individuals representing parent and progeny of a defined genetic cross. Segregation of the DNA polymorphisms is noted and used to calculate the position of the nucleic acid sequence encoding a PHDf-HD polypeptide in the genetic map previously obtained using this population (Botstein et al. (1980) Am. J. Hum. Genet. 32: 314-331).

[0520] The production and use of plant gene-derived probes for use in genetic mapping is described in Bernatzky and Tanksley (1986) Plant Mol. Biol. Reporter 4: 37-41. Numerous publications describe genetic mapping of specific cDNA clones using the methodology outlined above or variations thereof. For example, F2 intercross populations, backcross populations, randomly mated populations, near isogenic lines, and other sets of individuals may be used for mapping. Such methodologies are well known to those skilled in the art.

[0521] The nucleic acid sequence probes may also be used for physical mapping (i.e., placement of sequences on physical maps; see Hoheisel et al. In: Non-mammalian Genomic Analysis: A Practical Guide, Academic press 1996, pp. 319-346, and references cited therein).

[0522] In another embodiment, the nucleic acid sequence probes may be used in direct fluorescence in situ hybridisation (FISH) mapping (Trask (1991) Trends Genet. 7:149-154). Although current methods of FISH mapping favour use of large clones (several kb to several hundred kb; see Laan et al. (1995) Genome Res. 5:13-20), improvements in sensitivity may allow performance of FISH mapping using shorter probes.

[0523] A variety of nucleic acid sequence amplification-based methods for genetic and physical mapping may be carried out using the nucleic acid sequences. Examples include allele-specific amplification (Kazazian (1989) J. Lab. Clin. Med 11:95-96), polymorphism of PCR-amplified fragments (CAPS; Sheffield et al. (1993) Genomics 16:325-332), allele-specific ligation (Landegren et al. (1988) Science 241:1077-1080), nucleotide extension reactions (Sokolov (1990) Nucleic acid sequence Res. 18:3671), Radiation Hybrid Mapping (Walter et al. (1997) Nat. Genet. 7:22-28) and Happy Mapping (Dear and Cook (1989) Nucleic acid sequence Res. 17:6795-6807). For these methods, the sequence of a nucleic acid sequence is used to design and produce primer pairs for use in the amplification reaction or in primer extension reactions. The design of such primers is well known to those skilled in the art. In methods employing PCR-based genetic mapping, it may be necessary to identify DNA sequence differences between the parents of the mapping cross in the region corresponding to the instant nucleic acid sequence. This, however, is generally not necessary for mapping methods.

[0524] The methods according to the present invention result in plants having enhanced yield-related traits, preferably enhanced seed yield-related traits, as described hereinbefore. These traits may also be combined with other economically advantageous traits, such as further yield-enhancing traits, tolerance to other abiotic and biotic stresses, traits modifying various architectural features and/or biochemical and/or physiological features.

V. bHLH11-like (basic Helix-Loop-Helix 11)

[0525] Surprisingly, it has now been found that modulating expression in a plant of a nucleic acid encoding a bHLH11-like polypeptide gives plants having enhanced yield-related traits relative to control plants. According to a first embodiment, the present invention provides a method for enhancing yield-related traits in plants relative to control plants, comprising modulating expression in a plant of a nucleic acid encoding a bHLH11-like polypeptide.

[0526] A preferred method for modulating (preferably, increasing) expression of a nucleic acid encoding a bHLH11-like polypeptide is by introducing and expressing in a plant a nucleic acid encoding a bHLH11-like polypeptide.

[0527] Any reference hereinafter to a “protein useful in the methods of the invention” is taken to mean a bHLH11-like polypeptide as defined herein. Any reference hereinafter to a “nucleic acid useful in the methods of the invention” is taken to mean a nucleic acid capable of encoding such a bHLH11-like polypeptide. The nucleic acid to be introduced into a plant (and therefore useful in performing the methods of the invention) is any nucleic acid encoding the type of protein which will now be described, hereafter also named “bHLH11-like nucleic acid” or “bHLH11-like gene”.

[0528] A “bHLH11-like polypeptide” as defined herein refers to any polypeptide comprising a basic domain followed by a HLH domain (HMMPFam PF00010, ProfileScan PS50888, SMART SM00353) thereby forming a basic helix-loop-helix domain (bHLH) (Interpro IPR001092). Preferably, the bHLH11-like polypeptide comprises at least one, preferably two, more preferably three, most preferably four or more of the following motifs:

Motif 1 (SEQ ID NO: 246):
(E/D)(D/S/E)(F/M)(L/F)(D/E/Q/L)(Q/H/E)
Motif 2 (SEQ ID NO: 247):
RA(R/I/Q)RG(Q/H)ATDPHSIAER
Motif 3 (SEQ ID NO: 248):
(M/I/V/L)(K/R)(A/S/Q/D/N)LQ(E/D/V)LVP
Motif 4 (SEQ ID NO: 249):
(M/I)(L/I)DEI(I/V/L)(D/E/G)Y(V/L/I)(K/R)
FL(Q/R)LQ(V/I)K
Motif 5 (SEQ ID NO: 250):
(V/I)LSMSR(L/V)G
Motif 6 (SEQ ID NO: 251):
V(A/V/L/I)(K/R)(L/M)(M/L)(E/D)(E/D/S/K/T)
(D/N/S)(M/V/I)(G/T/I)XAMQ(Y/L/F)L
wherein X can be any amino acid, but preferably
one of S, T, A, M, K, N
Motif 7 (SEQ ID NO: 252):
(M/V)(P/S)(I/V)(S/T/A)LA

[0529] Alternatively, the homologue of a bHLH11-like protein has in increasing order of preference at least 25%, 26%, 27%, 28%, 29%, 30%, 31%, 32%, 33%, 34%, 35%, 36%, 37%, 38%, 39%, 40%, 41%, 42%, 43%, 44%, 45%, 46%, 47%, 48%, 49%, 50%, 51%, 52%, 53%, 54%, 55%, 56%, 57%, 58%, 59%, 60%, 61%, 62%, 63%, 64%, 65%, 66%, 67%, 68%, 69%, 70%, 71%, 72%, 73%, 74%, 75%, 76%, 77%, 78%, 79%, 80%, 81%, 82%, 83%, 84%, 85%, 86%, 87%, 88%, 89%, 90%, 91%, 92%, 93%, 94%, 95%, 96%, 97%, 98%, or 99% overall sequence identity to the amino acid represented by SEQ ID NO: 245, provided that the homologous protein comprises the conserved motifs as outlined above. The overall sequence identity is determined using a global alignment algorithm, such as the Needleman Wunsch algorithm in the program GAP (GCG Wisconsin Package, Accelrys), preferably with default parameters. Compared to overall sequence identity, the sequence identity will generally be higher when only conserved domains or motifs are considered. The sequence conservation is much higher in the region of the bHLH domain (see Table E3 in Example 45 and FIG. 21). Therefore the bHLH domain is a good criterion for the defining the group of bHLH11-like proteins. Preferably, the bHLH11-like polypeptide comprises the sequence of Motif 8 (SEQ ID NO: 253): SIAERLRRERIAERMRALQELVPNTNKTDRAVMLDEILDYVKFLRLQVKVL, or a sequence that has, in increasing order of preference, at least 75%, 76%, 77%, 78%, 79%, 80%, 81%, 82%, 83%, 84%, 85%, 86%, 87%, 88%, 89%, 90%, 91%, 92%, 93%, 94%, 95%, 96%, 97%, 98%, or 99% sequence identity to SEQ ID NO: 253. The HLH domain as determined by SMART spans residue 132 to 181 in SEQ ID NO: 245 and is comprised in Motif 8.

[0530] Preferably, the polypeptide sequence which when used in the construction of a phylogenetic tree, such as the one depicted in FIG. 22, clusters within the group of bHLH11-like proteins, rather than with other bHLH proteins. Similarly, the bHLH11-like protein of choice will cluster within subgroup C when a tree is constructed according to FIG. 6 in Li et al. (2006), rather than with any other group.

[0531] The terms “domain”, “signature” and “motif” are defined in the “definitions” section herein. Specialist databases exist for the identification of domains, for example, SMART (Schultz et al. (1998) Proc. Natl. Acad. Sci. USA 95, 5857-5864; Letunic et al. (2002) Nucleic Acids Res 30, 242-244), InterPro (Mulder et al., (2003) Nucl. Acids. Res. 31, 315-318), Prosite (Bucher and Bairoch (1994), A generalized profile syntax for biomolecular sequences motifs and its function in automatic sequence interpretation. (In) ISMB-94; Proceedings 2nd International Conference on Intelligent Systems for Molecular Biology. Altman R., Brutlag D., Karp P., Lathrop R., Searls D., Eds., pp53-61, AAAI Press, Menlo Park; Hulo et al., Nucl. Acids. Res. 32:D134-D137, (2004)), or Pfam (Bateman et al., Nucleic Acids Research 30(1): 276-280 (2002)). A set of tools for in silico analysis of protein sequences is available on the ExPASy proteomics server (Swiss Institute of Bioinformatics (Gasteiger et al., ExPASy: the proteomics server for in-depth protein knowledge and analysis, Nucleic Acids Res. 31:3784-3788(2003)). Domains or motifs may also be identified using routine techniques, such as by sequence alignment.

[0532] Methods for the alignment of sequences for comparison are well known in the art, such methods include GAP, BESTFIT, BLAST, FASTA and TFASTA. GAP uses the algorithm of Needleman and Wunsch ((1970) J Mol Biol 48: 443-453) to find the global (i.e. spanning the complete sequences) alignment of two sequences that maximizes the number of matches and minimizes the number of gaps. The BLAST algorithm (Altschul et al. (1990) J Mol Biol 215: 403-10) calculates percent sequence identity and performs a statistical analysis of the similarity between the two sequences. The software for performing BLAST analysis is publicly available through the National Centre for Biotechnology Information (NCBI). Homologues may readily be identified using, for example, the ClustalW multiple sequence alignment algorithm (version 1.83), with the default pairwise alignment parameters, and a scoring method in percentage. Global percentages of similarity and identity may also be determined using one of the methods available in the MatGAT software package (Campanella et al., BMC Bioinformatics. 2003 Jul. 10; 4:29. MatGAT: an application that generates similarity/identity matrices using protein or DNA sequences.). Minor manual editing may be performed to optimise alignment between conserved motifs, as would be apparent to a person skilled in the art. Furthermore, instead of using full-length sequences for the identification of homologues, specific domains may also be used. The sequence identity values may be determined over the entire nucleic acid or amino acid sequence or over selected domains or conserved motif(s), using the programs mentioned above using the default parameters. For local alignments, the Smith-Waterman algorithm is particularly useful (Smith T F, Waterman M S (1981) J. Mol. Biol 147(1); 195-7).

[0533] Furthermore, bHLH11-like polypeptides (at least in their native form) typically have DNA binding activity. Tools and techniques for measuring DNA binding activity are well known in the art. In addition, as shown in the present invention, a bHLH11-like protein, such as SEQ ID NO: 245, when overexpressed in rice, gives plants having enhanced yield-related traits, in particular increased fill rate. Further details are provided in Examples section.

[0534] The present invention is illustrated by transforming plants with the nucleic acid sequence represented by SEQ ID NO: 244, encoding the polypeptide sequence of SEQ ID NO: 245. However, performance of the invention is not restricted to these sequences; the methods of the invention may advantageously be performed using any bHLH11-like-encoding nucleic acid or bHLH11-like polypeptide as defined herein.

[0535] Examples of nucleic acids encoding bHLH11-like polypeptides are given in Table E1 of Example 43 herein. Such nucleic acids are useful in performing the methods of the invention. The amino acid sequences given in Table E1 of Example 43 are example sequences of orthologues and paralogues of the bHLH11-like polypeptide represented by SEQ ID NO: 245, the terms “orthologues” and “paralogues” being as defined herein. Further orthologues and paralogues may readily be identified by performing a so-called reciprocal blast search. Typically, this involves a first BLAST involving BLASTing a query sequence (for example using any of the sequences listed in Table E1 of Example 43) against any sequence database, such as the publicly available NCBI database. BLASTN or TBLASTX (using standard default values) are generally used when starting from a nucleotide sequence, and BLASTP or TBLASTN (using standard default values) when starting from a protein sequence. The BLAST results may optionally be filtered. The full-length sequences of either the filtered results or non-filtered results are then BLASTed back (second BLAST) against sequences from the organism from which the query sequence is derived (where the query sequence is SEQ ID NO: 244 or SEQ ID NO: 245, the second BLAST would therefore be against Triticum aestivum sequences). The results of the first and second BLASTs are then compared. A paralogue is identified if a high-ranking hit from the first blast is from the same species as from which the query sequence is derived, a BLAST back then ideally results in the query sequence amongst the highest hits; an orthologue is identified if a high-ranking hit in the first BLAST is not from the same species as from which the query sequence is derived, and preferably results upon BLAST back in the query sequence being among the highest hits.

[0536] High-ranking hits are those having a low E-value. The lower the E-value, the more significant the score (or in other words the lower the chance that the hit was found by chance). Computation of the E-value is well known in the art. In addition to E-values, comparisons are also scored by percentage identity. Percentage identity refers to the number of identical nucleotides (or amino acids) between the two compared nucleic acid (or polypeptide) sequences over a particular length. In the case of large families, ClustalW may be used, followed by a neighbour joining tree, to help visualize clustering of related genes and to identify orthologues and paralogues.

[0537] Nucleic acid variants may also be useful in practising the methods of the invention. Examples of such variants include nucleic acids encoding homologues and derivatives of any one of the amino acid sequences given in Table E1 of Example 43, the terms “homologue” and “derivative” being as defined herein. Also useful in the methods of the invention are nucleic acids encoding homologues and derivatives of orthologues or paralogues of any one of the amino acid sequences given in Table E1 of Example 43. Homologues and derivatives useful in the methods of the present invention have substantially the same biological and functional activity as the unmodified protein from which they are derived.

[0538] Further nucleic acid variants useful in practising the methods of the invention include portions of nucleic acids encoding bHLH11-like polypeptides, nucleic acids hybridising to nucleic acids encoding bHLH11-like polypeptides, splice variants of nucleic acids encoding bHLH11-like polypeptides, allelic variants of nucleic acids encoding bHLH11-like polypeptides and variants of nucleic acids encoding bHLH11-like polypeptides obtained by gene shuffling. The terms hybridising sequence, splice variant, allelic variant and gene shuffling are as described herein.

[0539] Nucleic acids encoding bHLH11-like polypeptides need not be full-length nucleic acids, since performance of the methods of the invention does not rely on the use of full-length nucleic acid sequences. According to the present invention, there is provided a method for enhancing yield-related traits in plants, comprising introducing and expressing in a plant a portion of any one of the nucleic acid sequences given in Table E1 of Example 43, or a portion of a nucleic acid encoding an orthologue, paralogue or homologue of any of the amino acid sequences given in Table E1 of Example 43.

[0540] A portion of a nucleic acid may be prepared, for example, by making one or more deletions to the nucleic acid. The portions may be used in isolated form or they may be fused to other coding (or non-coding) sequences in order to, for example, produce a protein that combines several activities. When fused to other coding sequences, the resultant polypeptide produced upon translation may be bigger than that predicted for the protein portion.

[0541] Portions useful in the methods of the invention, encode a bHLH11-like polypeptide as defined herein, and have substantially the same biological activity as the amino acid sequences given in Table E1 of Example 43. Preferably, the portion is a portion of any one of the nucleic acids given in Table E1 of Example 43, or is a portion of a nucleic acid encoding an orthologue or paralogue of any one of the amino acid sequences given in Table E1 of Example 43. Preferably the portion is at least 500, 550, 600, 650, 700, 750, 800, 850, 900, 950, 1000, 1100, 1200, 1300, 1400, 1500, 1600, 1700, 1800, 1900, 2000, 2100, 2200, 2300, 2400, 2500 consecutive nucleotides in length, the consecutive nucleotides being of any one of the nucleic acid sequences given in Table E1 of Example 43, or of a nucleic acid encoding an orthologue or paralogue of any one of the amino acid sequences given in Table E1 of Example 43. Most preferably the portion is a portion of the nucleic acid of SEQ ID NO: 244. Preferably, the portion encodes a fragment of an amino acid sequence which, when used in the construction of a phylogenetic tree, such as the one depicted in FIG. 22, clusters within the group of bHLH11-like proteins, rather than with other bHLH proteins. Similarly, the bHLH11-like protein of choice will cluster within subgroup C when a tree is constructed according to FIG. 6 in Li et al. (2006), rather than with any other group.

[0542] Another nucleic acid variant useful in the methods of the invention is a nucleic acid capable of hybridising, under reduced stringency conditions, preferably under stringent conditions, with a nucleic acid encoding a bHLH11-like polypeptide as defined herein, or with a portion as defined herein.

[0543] According to the present invention, there is provided a method for enhancing yield-related traits in plants, comprising introducing and expressing in a plant a nucleic acid capable of hybridizing to any one of the nucleic acids given in Table E1 of Example 43, or comprising introducing and expressing in a plant a nucleic acid capable of hybridising to a nucleic acid encoding an orthologue, paralogue or homologue of any of the nucleic acid sequences given in Table E1 of Example 43.

[0544] Hybridising sequences useful in the methods of the invention encode a bHLH11-like polypeptide as defined herein, having substantially the same biological activity as the amino acid sequences given in Table E1 of Example 43. Preferably, the hybridising sequence is capable of hybridising to the complement of any one of the nucleic acids given in Table E1 of Example 43, or to a portion of any of these sequences, a portion being as defined above, or the hybridising sequence is capable of hybridising to the complement of a nucleic acid encoding an orthologue or paralogue of any one of the amino acid sequences given in Table E1 of Example 43. Most preferably, the hybridising sequence is capable of hybridising to the complement of a nucleic acid as represented by SEQ ID NO: 244 or to a portion thereof.

[0545] Preferably, the hybridising sequence encodes a polypeptide with an amino acid sequence which, when full-length and used in the construction of a phylogenetic tree, such as the one depicted in FIG. 22, clusters within the group of bHLH11-like proteins, rather than with other bHLH proteins. Similarly, the bHLH11-like protein of choice will cluster within subgroup C when a tree is constructed according to FIG. 6 in Li et al. (2006), rather than with any other group.

[0546] Another nucleic acid variant useful in the methods of the invention is a splice variant encoding a bHLH11-like polypeptide as defined hereinabove, a splice variant being as defined herein.

[0547] According to the present invention, there is provided a method for enhancing yield-related traits in plants, comprising introducing and expressing in a plant a splice variant of any one of the nucleic acid sequences given in Table E1 of Example 43, or a splice variant of a nucleic acid encoding an orthologue, paralogue or homologue of any of the amino acid sequences given in Table E1 of Example 43.

[0548] Preferred splice variants are splice variants of a nucleic acid represented by SEQ ID NO: 244, or a splice variant of a nucleic acid encoding an orthologue or paralogue of SEQ ID NO: 245. Preferably, the amino acid sequence encoded by the splice variant, when used in the construction of a phylogenetic tree, such as the one depicted in FIG. 22, clusters within the group of bHLH11-like proteins, rather than with other bHLH proteins. Similarly, the bHLH11-like protein of choice will cluster within subgroup C when a tree is constructed according to FIG. 6 in Li et al. (2006), rather than with any other group.

[0549] Another nucleic acid variant useful in performing the methods of the invention is an allelic variant of a nucleic acid encoding a bHLH11-like polypeptide as defined hereinabove, an allelic variant being as defined herein.

[0550] According to the present invention, there is provided a method for enhancing yield-related traits in plants, comprising introducing and expressing in a plant an allelic variant of any one of the nucleic acids given in Table E1 of Example 43, or comprising introducing and expressing in a plant an allelic variant of a nucleic acid encoding an orthologue, paralogue or homologue of any of the amino acid sequences given in Table E1 of Example 43.

[0551] The polypeptides encoded by allelic variants useful in the methods of the present invention have substantially the same biological activity as the bHLH11-like polypeptide of SEQ ID NO: 244 and any of the amino acids depicted in Table E1 of Example 43. Allelic variants exist in nature, and encompassed within the methods of the present invention is the use of these natural alleles. Preferably, the allelic variant is an allelic variant of SEQ ID NO: 244 or an allelic variant of a nucleic acid encoding an orthologue or paralogue of SEQ ID NO: 245. Preferably, the amino acid sequence encoded by the allelic variant, when used in the construction of a phylogenetic tree, such as the one depicted in FIG. 22, clusters within the group of bHLH11-like proteins, rather than with other bHLH proteins. Similarly, the bHLH11-like protein of choice will cluster within subgroup C when a tree is constructed according to FIG. 6 in Li et al. (2006), rather than with any other group.

[0552] Gene shuffling or directed evolution may also be used to generate variants of nucleic acids encoding bHLH11-like polypeptides as defined above; the term “gene shuffling” being as defined herein.

[0553] According to the present invention, there is provided a method for enhancing yield-related traits in plants, comprising introducing and expressing in a plant a variant of any one of the nucleic acid sequences given in Table E1 of Example 43, or comprising introducing and expressing in a plant a variant of a nucleic acid encoding an orthologue, paralogue or homologue of any of the amino acid sequences given in Table E1 of Example 43, which variant nucleic acid is obtained by gene shuffling.

[0554] Preferably, the amino acid sequence encoded by the variant nucleic acid obtained by gene shuffling, when used in the construction of a phylogenetic tree, such as the one depicted in FIG. 22, clusters within the group of bHLH11-like proteins, rather than with other bHLH proteins. Similarly, the bHLH11-like protein of choice will cluster within subgroup C when a tree is constructed according to FIG. 6 in Li et al. (2006), rather than with any other group.

[0555] Furthermore, nucleic acid variants may also be obtained by site-directed mutagenesis. Several methods are available to achieve site-directed mutagenesis, the most common being PCR based methods (Current Protocols in Molecular Biology. Wiley Eds.).

[0556] Nucleic acids encoding bHLH11-like polypeptides may be derived from any natural or artificial source. The nucleic acid may be modified from its native form in composition and/or genomic environment through deliberate human manipulation. Preferably the bHLH11-like polypeptide-encoding nucleic acid is from a plant, further preferably from a monocotyledonous plant, more preferably from the family Poaceae, most preferably the nucleic acid is from Triticum aestivum.

[0557] Performance of the methods of the invention gives plants having enhanced yield-related traits. In particular performance of the methods of the invention gives plants having increased yield, especially increased seed yield relative to control plants. The terms “yield” and “seed yield” are described in more detail in the “definitions” section herein.

[0558] Reference herein to enhanced yield-related traits is taken to mean an increase in biomass (weight) of one or more parts of a plant, which may include aboveground (harvestable) parts and/or (harvestable) parts below ground. In particular, such harvestable parts are seeds, and performance of the methods of the invention results in plants having increased seed yield relative to the seed yield of control plants.

[0559] Taking corn as an example, a yield increase may be manifested as one or more of the following: increase in the number of plants established per square meter, an increase in the number of ears per plant, an increase in the number of rows, number of kernels per row, kernel weight, thousand kernel weight, ear length/diameter, increase in the seed filling rate (which is the number of filled seeds divided by the total number of seeds and multiplied by 100), among others. Taking rice as an example, a yield increase may manifest itself as an increase in one or more of the following: number of plants per square meter, number of panicles per plant, number of spikelets per panicle, number of flowers (florets) per panicle (which is expressed as a ratio of the number of filled seeds over the number of primary panicles), increase in the seed filling rate (which is the number of filled seeds divided by the total number of seeds and multiplied by 100), increase in thousand kernel weight, among others.

[0560] The present invention provides a method for increasing yield, especially seed yield of plants, relative to control plants, which method comprises modulating expression in a plant of a nucleic acid encoding a bHLH11-like polypeptide as defined herein.

[0561] Since the transgenic plants according to the present invention have increased yield, it is likely that these plants exhibit an increased growth rate (during at least part of their life cycle), relative to the growth rate of control plants at a corresponding stage in their life cycle.

[0562] The increased growth rate may be specific to one or more parts of a plant (including seeds), or may be throughout substantially the whole plant. Plants having an increased growth rate may have a shorter life cycle. The life cycle of a plant may be taken to mean the time needed to grow from a dry mature seed up to the stage where the plant has produced dry mature seeds, similar to the starting material. This life cycle may be influenced by factors such as early vigour, growth rate, greenness index, flowering time and speed of seed maturation. The increase in growth rate may take place at one or more stages in the life cycle of a plant or during substantially the whole plant life cycle. Increased growth rate during the early stages in the life cycle of a plant may reflect enhanced vigour. The increase in growth rate may alter the harvest cycle of a plant allowing plants to be sown later and/or harvested sooner than would otherwise be possible (a similar effect may be obtained with earlier flowering time). If the growth rate is sufficiently increased, it may allow for the further sowing of seeds of the same plant species (for example sowing and harvesting of rice plants followed by sowing and harvesting of further rice plants all within one conventional growing period). Similarly, if the growth rate is sufficiently increased, it may allow for the further sowing of seeds of different plants species (for example the sowing and harvesting of corn plants followed by, for example, the sowing and optional harvesting of soybean, potato or any other suitable plant). Harvesting additional times from the same rootstock in the case of some crop plants may also be possible. Altering the harvest cycle of a plant may lead to an increase in annual biomass production per square meter (due to an increase in the number of times (say in a year) that any particular plant may be grown and harvested). An increase in growth rate may also allow for the cultivation of transgenic plants in a wider geographical area than their wild-type counterparts, since the territorial limitations for growing a crop are often determined by adverse environmental conditions either at the time of planting (early season) or at the time of harvesting (late season). Such adverse conditions may be avoided if the harvest cycle is shortened. The growth rate may be determined by deriving various parameters from growth curves, such parameters may be: T-Mid (the time taken for plants to reach 50% of their maximal size) and T-90 (time taken for plants to reach 90% of their maximal size), amongst others.

[0563] According to a preferred feature of the present invention, performance of the methods of the invention gives plants having an increased growth rate relative to control plants. Therefore, according to the present invention, there is provided a method for increasing the growth rate of plants, which method comprises modulating expression in a plant of a nucleic acid encoding a bHLH11-like polypeptide as defined herein.

[0564] An increase in yield and/or growth rate occurs whether the plant is under non-stress conditions or whether the plant is exposed to various stresses compared to control plants. Plants typically respond to exposure to stress by growing more slowly. In conditions of severe stress, the plant may even stop growing altogether. Mild stress on the other hand is defined herein as being any stress to which a plant is exposed which does not result in the plant ceasing to grow altogether without the capacity to resume growth. Mild stress in the sense of the invention leads to a reduction in the growth of the stressed plants of less than 40%, 35% or 30%, preferably less than 25%, 20% or 15%, more preferably less than 14%, 13%, 12%, 11% or 10% or less in comparison to the control plant under non-stress conditions. Due to advances in agricultural practices (irrigation, fertilization, pesticide treatments) severe stresses are not often encountered in cultivated crop plants. As a consequence, the compromised growth induced by mild stress is often an undesirable feature for agriculture. Mild stresses are the everyday biotic and/or abiotic (environmental) stresses to which a plant is exposed. Abiotic stresses may be due to drought or excess water, anaerobic stress, salt stress, chemical toxicity, oxidative stress and hot, cold or freezing temperatures. The abiotic stress may be an osmotic stress caused by a water stress (particularly due to drought), salt stress, oxidative stress or an ionic stress. Biotic stresses are typically those stresses caused by pathogens, such as bacteria, viruses, fungi, nematodes and insects.

[0565] In particular, the methods of the present invention may be performed under non-stress conditions or under conditions of mild drought to give plants having increased yield relative to control plants. As reported in Wang et al. (Planta (2003) 218: 1-14), abiotic stress leads to a series of morphological, physiological, biochemical and molecular changes that adversely affect plant growth and productivity. Drought, salinity, extreme temperatures and oxidative stress are known to be interconnected and may induce growth and cellular damage through similar mechanisms. Rabbani et al. (Plant Physiol (2003) 133: 1755-1767) describes a particularly high degree of “cross talk” between drought stress and high-salinity stress. For example, drought and/or salinisation are manifested primarily as osmotic stress, resulting in the disruption of homeostasis and ion distribution in the cell. Oxidative stress, which frequently accompanies high or low temperature, salinity or drought stress, may cause denaturing of functional and structural proteins. As a consequence, these diverse environmental stresses often activate similar cell signalling pathways and cellular responses, such as the production of stress proteins, up-regulation of anti-oxidants, accumulation of compatible solutes and growth arrest. The term “non-stress” conditions as used herein are those environmental conditions that allow optimal growth of plants. Persons skilled in the art are aware of normal soil conditions and climatic conditions for a given location. Plants with optimal growth conditions, (grown under non-stress conditions) typically yield in increasing order of preference at least 90%, 87%, 85%, 83%, 80%, 77% or 75% of the average production of such plant in a given environment. Average production may be calculated on harvest and/or season basis. Persons skilled in the art are aware of average yield productions of a crop.

[0566] Performance of the methods of the invention gives plants grown under non-stress conditions or under mild drought conditions increased yield relative to control plants grown under comparable conditions. Therefore, according to the present invention, there is provided a method for increasing yield in plants grown under non-stress conditions or under mild drought conditions, which method comprises modulating expression in a plant of a nucleic acid encoding a bHLH11-like polypeptide.

[0567] Performance of the methods of the invention gives plants grown under conditions of nutrient deficiency, particularly under conditions of nitrogen deficiency, increased yield relative to control plants grown under comparable conditions. Therefore, according to the present invention, there is provided a method for increasing yield in plants grown under conditions of nutrient deficiency, which method comprises modulating expression in a plant of a nucleic acid encoding a bHLH11-like polypeptide, provided that the nutrient deficiency is not a phosphate deficiency. Nutrient deficiency may result from a lack of nutrients such as nitrogen, phosphates and other phosphorous-containing compounds, potassium, calcium, cadmium, magnesium, manganese, iron and boron, amongst others. However, the term “nutrient deficiency” as used in the context of the present invention does not encompass a deficiency in phosphate.

[0568] The present invention encompasses plants or parts thereof (including seeds) obtainable by the methods according to the present invention. The plants or parts thereof comprise a nucleic acid transgene encoding a bHLH11-like polypeptide as defined above.

[0569] The invention also provides genetic constructs and vectors to facilitate introduction and/or expression in plants of nucleic acids encoding bHLH11-like polypeptides. The gene constructs may be inserted into vectors, which may be commercially available, suitable for transforming into plants and suitable for expression of the gene of interest in the transformed cells. The invention also provides use of a gene construct as defined herein in the methods of the invention.

[0570] More specifically, the present invention provides a construct comprising:
[0571] (a) a nucleic acid encoding a bHLH11-like polypeptide as defined above;
[0572] (b) one or more control sequences capable of driving expression of the nucleic acid sequence of (a); and optionally
[0573] (c) a transcription termination sequence.

[0574] Preferably, the nucleic acid encoding a bHLH11-like polypeptide is as defined above. The term “control sequence” and “termination sequence” are as defined herein.

[0575] Plants are transformed with a vector comprising any of the nucleic acids described above. The skilled artisan is well aware of the genetic elements that must be present on the vector in order to successfully transform, select and propagate host cells containing the sequence of interest. The sequence of interest is operably linked to one or more control sequences (at least to a promoter).

[0576] Advantageously, any type of promoter, whether natural or synthetic, may be used to drive expression of the nucleic acid sequence, but preferably the promoter is of plant origin. A constitutive promoter is particularly useful in the methods. Preferably the constitutive promoter is also a ubiquitous promoter of medium strength. See the “Definitions” section herein for definitions of the various promoter types.

[0577] It should be clear that the applicability of the present invention is not restricted to the bHLH11-like polypeptide-encoding nucleic acid represented by SEQ ID NO: 1, nor is the applicability of the invention restricted to expression of a bHLH11-like polypeptide-encoding nucleic acid when driven by a constitutive promoter.

[0578] The constitutive promoter is preferably a medium strength promoter, such as a GOS2 promoter, preferably the promoter is a GOS2 promoter from rice. Further preferably the constitutive promoter is represented by a nucleic acid sequence substantially similar to SEQ ID NO: 256, most preferably the constitutive promoter is as represented by SEQ ID NO: 256. See the “Definitions” section herein for further examples of constitutive promoters.

[0579] Optionally, one or more terminator sequences may be used in the construct introduced into a plant. Preferably, the construct comprises an expression cassette comprising the GOS2 promoter substantially similar to SEQ ID NO: 256 and the nucleic acid encoding the bHLH11-like polypeptide.

[0580] Additional regulatory elements may include transcriptional as well as translational enhancers. Those skilled in the art will be aware of terminator and enhancer sequences that may be suitable for use in performing the invention. An intron sequence may also be added to the 5′ untranslated region (UTR) or in the coding sequence to increase the amount of the mature message that accumulates in the cytosol, as described in the definitions section. Other control sequences (besides promoter, enhancer, silencer, intron sequences, 3′UTR and/or 5′UTR regions) may be protein and/or RNA stabilizing elements. Such sequences would be known or may readily be obtained by a person skilled in the art.

[0581] The genetic constructs of the invention may further include an origin of replication sequence that is required for maintenance and/or replication in a specific cell type. One example is when a genetic construct is required to be maintained in a bacterial cell as an episomal genetic element (e.g. plasmid or cosmid molecule). Preferred origins of replication include, but are not limited to, the f1-ori and colE1.

[0582] For the detection of the successful transfer of the nucleic acid sequences as used in the methods of the invention and/or selection of transgenic plants comprising these nucleic acids, it is advantageous to use marker genes (or reporter genes). Therefore, the genetic construct may optionally comprise a selectable marker gene. Selectable markers are described in more detail in the “definitions” section herein. The marker genes may be removed or excised from the transgenic cell once they are no longer needed. Techniques for marker removal are known in the art, useful techniques are described above in the definitions section.

[0583] The invention also provides a method for the production of transgenic plants having enhanced yield-related traits relative to control plants, comprising introduction and expression in a plant of any nucleic acid encoding a bHLH11-like polypeptide as defined hereinabove.

[0584] More specifically, the present invention provides a method for the production of transgenic plants having increased enhanced yield-related traits, particularly increased (seed) yield, which method comprises:
[0585] (i) introducing and expressing in a plant or plant cell a bHLH11-like polypeptide-encoding nucleic acid; and
[0586] (ii) cultivating the plant cell under conditions promoting plant growth and development.

[0587] The nucleic acid of (i) may be any of the nucleic acids capable of encoding a bHLH11-like polypeptide as defined herein.

[0588] The nucleic acid may be introduced directly into a plant cell or into the plant itself (including introduction into a tissue, organ or any other part of a plant). According to a preferred feature of the present invention, the nucleic acid is preferably introduced into a plant by transformation. The term “transformation” is described in more detail in the “definitions” section herein.

[0589] The genetically modified plant cells can be regenerated via all methods with which the skilled worker is familiar. Suitable methods can be found in the abovementioned publications by S. D. Kung and R. Wu, Potrykus or Hofgen and Willmitzer.

[0590] Generally after transformation, plant cells or cell groupings are selected for the presence of one or more markers which are encoded by plant-expressible genes co-transferred with the gene of interest, following which the transformed material is regenerated into a whole plant. To select transformed plants, the plant material obtained in the transformation is, as a rule, subjected to selective conditions so that transformed plants can be distinguished from untransformed plants. For example, the seeds obtained in the above-described manner can be planted and, after an initial growing period, subjected to a suitable selection by spraying. A further possibility consists in growing the seeds, if appropriate after sterilization, on agar plates using a suitable selection agent so that only the transformed seeds can grow into plants. Alternatively, the transformed plants are screened for the presence of a selectable marker such as the ones described above.

[0591] Following DNA transfer and regeneration, putatively transformed plants may also be evaluated, for instance using Southern analysis, for the presence of the gene of interest, copy number and/or genomic organisation. Alternatively or additionally, expression levels of the newly introduced DNA may be monitored using Northern and/or Western analysis, both techniques being well known to persons having ordinary skill in the art.

[0592] The generated transformed plants may be propagated by a variety of means, such as by clonal propagation or classical breeding techniques. For example, a first generation (or T1) transformed plant may be selfed and homozygous second-generation (or T2) transformants selected, and the T2 plants may then further be propagated through classical breeding techniques. The generated transformed organisms may take a variety of forms. For example, they may be chimeras of transformed cells and non-transformed cells; clonal transformants (e.g., all cells transformed to contain the expression cassette); grafts of transformed and untransformed tissues (e.g., in plants, a transformed rootstock grafted to an untransformed scion).

[0593] The present invention clearly extends to any plant cell or plant produced by any of the methods described herein, and to all plant parts and propagules thereof. The present invention extends further to encompass the progeny of a primary transformed or transfected cell, tissue, organ or whole plant that has been produced by any of the aforementioned methods, the only requirement being that progeny exhibit the same genotypic and/or phenotypic characteristic(s) as those produced by the parent in the methods according to the invention.

[0594] The invention also includes host cells containing an isolated nucleic acid encoding a bHLH11-like polypeptide as defined hereinabove. Preferred host cells according to the invention are plant cells. Host plants for the nucleic acids or the vector used in the method according to the invention, the expression cassette or construct or vector are, in principle, advantageously all plants, which are capable of synthesizing the polypeptides used in the inventive method.

[0595] The methods of the invention are advantageously applicable to any plant. Plants that are particularly useful in the methods of the invention include all plants which belong to the superfamily Viridiplantae, in particular monocotyledonous and dicotyledonous plants including fodder or forage legumes, ornamental plants, food crops, trees or shrubs. According to a preferred embodiment of the present invention, the plant is a crop plant. Examples of crop plants include soybean, sunflower, canola, alfalfa, rapeseed, linseed, cotton, tomato, potato and tobacco. Further preferably, the plant is a monocotyledonous plant. Examples of monocotyledonous plants include sugarcane. More preferably the plant is a cereal. Examples of cereals include rice, maize, wheat, barley, millet, rye, triticale, sorghum, emmer, spelt, secale, einkorn, teff, milo and oats.

[0596] The invention also extends to harvestable parts of a plant such as, but not limited to seeds, leaves, fruits, flowers, stems, roots, rhizomes, tubers and bulbs, which harvestable parts comprise a recombinant nucleic acid encoding a bHLH11-like polypeptide. The invention furthermore relates to products derived, preferably directly derived, from a harvestable part of such a plant, such as dry pellets or powders, oil, fat and fatty acids, starch or proteins.

[0597] According to a preferred feature of the invention, the modulated expression is increased expression. Methods for increasing expression of nucleic acids or genes, or gene products, are well documented in the art and examples are provided in the definitions section.

[0598] As mentioned above, a preferred method for modulating expression of a nucleic acid encoding a bHLH11-like polypeptide is by introducing and expressing in a plant a nucleic acid encoding a bHLH11-like polypeptide; however the effects of performing the method, i.e. enhancing yield-related traits may also be achieved using other well known techniques, including but not limited to T-DNA activation tagging, TILLING, homologous recombination. A description of these techniques is provided in the definitions section.

[0599] The present invention also encompasses use of nucleic acids encoding bHLH11-like polypeptides as described herein and use of these bHLH11-like polypeptides in enhancing any of the aforementioned yield-related traits in plants.

[0600] Nucleic acids encoding bHLH11-like polypeptide described herein, or the bHLH11-like polypeptides themselves, may find use in breeding programmes in which a DNA marker is identified which may be genetically linked to a bHLH11-like polypeptide-encoding gene. The nucleic acids/genes, or the bHLH11-like polypeptides themselves may be used to define a molecular marker. This DNA or protein marker may then be used in breeding programmes to select plants having enhanced yield-related traits as defined hereinabove in the methods of the invention.

[0601] Allelic variants of a bHLH11-like polypeptide-encoding nucleic acid/gene may also find use in marker-assisted breeding programmes. Such breeding programmes sometimes require introduction of allelic variation by mutagenic treatment of the plants, using for example EMS mutagenesis; alternatively, the programme may start with a collection of allelic variants of so called “natural” origin caused unintentionally. Identification of allelic variants then takes place, for example, by PCR. This is followed by a step for selection of superior allelic variants of the sequence in question and which give increased yield. Selection is typically carried out by monitoring growth performance of plants containing different allelic variants of the sequence in question. Growth performance may be monitored in a greenhouse or in the field. Further optional steps include crossing plants in which the superior allelic variant was identified with another plant. This could be used, for example, to make a combination of interesting phenotypic features.

[0602] Nucleic acids encoding bHLH11-like polypeptides may also be used as probes for genetically and physically mapping the genes that they are a part of, and as markers for traits linked to those genes. Such information may be useful in plant breeding in order to develop lines with desired phenotypes. Such use of bHLH11-like polypeptide-encoding nucleic acids requires only a nucleic acid sequence of at least 15 nucleotides in length. The bHLH11-like polypeptide-encoding nucleic acids may be used as restriction fragment length polymorphism (RFLP) markers. Southern blots (Sambrook J, Fritsch E F and Maniatis T (1989) Molecular Cloning, A Laboratory Manual) of restriction-digested plant genomic DNA may be probed with the bHLH11-like-encoding nucleic acids. The resulting banding patterns may then be subjected to genetic analyses using computer programs such as MapMaker (Lander et al. (1987) Genomics 1: 174-181) in order to construct a genetic map. In addition, the nucleic acids may be used to probe Southern blots containing restriction endonuclease-treated genomic DNAs of a set of individuals representing parent and progeny of a defined genetic cross. Segregation of the DNA polymorphisms is noted and used to calculate the position of the bHLH11-like polypeptide-encoding nucleic acid in the genetic map previously obtained using this population (Botstein et al. (1980) Am. J. Hum. Genet. 32:314-331).

[0603] The production and use of plant gene-derived probes for use in genetic mapping is described in Bernatzky and Tanksley (1986) Plant Mol. Biol. Reporter 4: 37-41. Numerous publications describe genetic mapping of specific cDNA clones using the methodology outlined above or variations thereof. For example, F2 intercross populations, backcross populations, randomly mated populations, near isogenic lines, and other sets of individuals may be used for mapping. Such methodologies are well known to those skilled in the art.

[0604] The nucleic acid probes may also be used for physical mapping (i.e., placement of sequences on physical maps; see Hoheisel et al. In: Non-mammalian Genomic Analysis: A Practical Guide, Academic press 1996, pp. 319-346, and references cited therein).

[0605] In another embodiment, the nucleic acid probes may be used in direct fluorescence in situ hybridisation (FISH) mapping (Trask (1991) Trends Genet. 7:149-154). Although current methods of FISH mapping favour use of large clones (several kb to several hundred kb; see Laan et al. (1995) Genome Res. 5:13-20), improvements in sensitivity may allow performance of FISH mapping using shorter probes.

[0606] A variety of nucleic acid amplification-based methods for genetic and physical mapping may be carried out using the nucleic acids. Examples include allele-specific amplification (Kazazian (1989) J. Lab. Clin. Med 11:95-96), polymorphism of PCR-amplified fragments (CAPS; Sheffield et al. (1993) Genomics 16:325-332), allele-specific ligation (Landegren et al. (1988) Science 241:1077-1080), nucleotide extension reactions (Sokolov (1990) Nucleic Acid Res. 18:3671), Radiation Hybrid Mapping (Walter et al. (1997) Nat. Genet. 7:22-28) and Happy Mapping (Dear and Cook (1989) Nucleic Acid Res. 17:6795-6807). For these methods, the sequence of a nucleic acid is used to design and produce primer pairs for use in the amplification reaction or in primer extension reactions. The design of such primers is well known to those skilled in the art. In methods employing PCR-based genetic mapping, it may be necessary to identify DNA sequence differences between the parents of the mapping cross in the region corresponding to the instant nucleic acid sequence. This, however, is generally not necessary for mapping methods.

[0607] The methods according to the present invention result in plants having enhanced yield-related traits, as described hereinbefore. These traits may also be combined with other economically advantageous traits, such as further yield-enhancing traits, tolerance to other abiotic and biotic stresses, traits modifying various architectural features and/or biochemical and/or physiological features.

### VI. ASR (Abscisic Acid-, Stress-, and Ripening-Induced) Polypeptide

[0608] A preferred method for modulating (preferably, increasing) expression of a nucleic acid encoding an ASR polypeptide is by introducing and expressing in a plant a nucleic acid encoding an ASR polypeptide.

[0609] Any reference hereinafter to a “protein useful in the methods of the invention” is taken to mean an ASR polypeptide as defined herein. Any reference hereinafter to a “nucleic acid useful in the methods of the invention” is taken to mean a nucleic acid capable of encoding such an ASR polypeptide. The nucleic acid to be introduced into a plant (and therefore useful in performing the methods of the invention) is any nucleic acid encoding the type of protein which will now be described, hereafter also named “ASR nucleic acid” or “ASR gene”.

[0610] A “ASR polypeptide” as defined herein refers the proteins represented by SEQ ID NO: 397 and to homologues (orthologues and paralogues) thereof.

[0611] Preferably, the homologues of SEQ ID NO: 397 have a ABA WDS domain (Pfam entry PF02496).

[0612] Further Preferably ASR polypeptides of the invention are those having in increasing order of preference at least 50%, 55%, 60%, 65%, 70%, 75%, 80%, 83%, 85%, 87%, 90%, 91%, 92%, 93%, 94%, 95%, 96%, 97%, 98%, 99%, or more sequence identity to any of the polypeptides given in Table F1.

[0613] The term “domain” and “motif” is defined in the “definitions” section herein. Specialist databases exist for the identification of domains, for example, SMART (Schultz et al. (1998) Proc. Natl. Acad. Sci. USA 95, 5857-5864; Letunic et al. (2002) Nucleic Acids Res 30, 242-244), InterPro (Mulder et al., (2003) Nucl. Acids. Res. 31, 315-318), Prosite (Bucher and Bairoch (1994), A generalized profile syntax for biomolecular sequences motifs and its function in automatic sequence interpretation. (In) ISMB-94; Proceedings 2nd International Conference on Intelligent Systems for Molecular Biology. Altman R., Brutlag D., Karp P., Lathrop R., Searls D., Eds., pp53-61, AAAI Press, Menlo Park; Hulo et al., Nucl. Acids. Res. 32:D134-D137, (2004)), or Pfam (Bateman et al., Nucleic Acids Research 30(1): 276-280 (2002)). A set of tools for in silico analysis of protein sequences is available on the ExPASy proteomics server (Swiss Institute of Bioinformatics (Gasteiger et al., ExPASy: the proteomics server for in-depth protein knowledge and analysis, Nucleic Acids Res. 31:3784-3788(2003)). Domains or motifs may also be identified using routine techniques, such as by sequence alignment.

[0614] Methods for the alignment of sequences for comparison are well known in the art, such methods include GAP, BESTFIT, BLAST, FASTA and TFASTA. GAP uses the algorithm of Needleman and Wunsch ((1970) J Mol Biol 48: 443-453) to find the global (i.e. spanning the complete sequences) alignment of two sequences that maximizes the number of matches and minimizes the number of gaps. The BLAST algorithm (Altschul et al. (1990) J Mol Biol 215: 403-10) calculates percent sequence identity and performs a statistical analysis of the similarity between the two sequences. The software for performing BLAST analysis is publicly available through the National Centre for Biotechnology Information (NCBI). Homologues may readily be identified using, for example, the ClustalW multiple sequence alignment algorithm (version 1.83), with the default pairwise alignment parameters, and a scoring method in percentage. Global percentages of similarity and identity may also be determined using one of the methods available in the MatGAT software package (Campanella et al., BMC Bioinformatics. 2003 Jul. 10; 4:29. MatGAT: an application that generates similarity/identity matrices using protein or DNA sequences.). Minor manual editing may be performed to optimise alignment between conserved motifs, as would be apparent to a person skilled in the art. Furthermore, instead of using full-length sequences for the identification of homologues, specific domains may also be used. The sequence identity values may be determined over the entire nucleic acid or amino acid sequence or over selected domains or conserved motif(s), using the programs mentioned above using the default parameters.

[0615] Furthermore, ASR polypeptides (at least in their native form), as far as SEQ ID NO: 397 and its homologues are concerned, typically have the capability to increase salt stress resistance of plants. Tools and techniques for expressing the ASR in plants and testing for increased salt stress resistance are well known in the art.

[0616] The present invention is illustrated by transforming plants with the nucleic acid sequence represented by SEQ ID NO: 396, encoding the polypeptide sequence of SEQ ID NO: 397. However, performance of the invention is not restricted to these sequences; the methods of the invention may advantageously be performed using any ASR-encoding nucleic acid or ASR polypeptide as defined herein.

[0617] Examples of nucleic acids encoding ASR polypeptides may be found in databases known in the art. Such nucleic acids are useful in performing the methods of the invention. Orthologues and paralogues, the terms “orthologues” and “paralogues” being as defined herein, may readily be identified by performing a so-called reciprocal blast search. Typically, this involves a first BLAST involving BLASTing a query sequence (for example using SEQ ID NO: 397) against any sequence database, such as the publicly available NCBI database. BLASTN or TBLASTX (using standard default values) are generally used when starting from a nucleotide sequence, and BLASTP or TBLASTN (using standard default values) when starting from a protein sequence. The BLAST results may optionally be filtered. The full-length sequences of either the filtered results or non-filtered results are then BLASTed back (second BLAST) against sequences from the organism from which the query sequence is derived (where the query sequence is SEQ ID NO: 396 or SEQ ID NO: 397, the second BLAST would therefore be against Oryza sativa sequences). The results of the first and second BLASTs are then compared. A paralogue is identified if a high-ranking hit from the first blast is from the same species as from which the query sequence is derived, a BLAST back then ideally results in the query sequence amongst the highest hits; an orthologue is identified if a high-ranking hit in the first BLAST is not from the same species as from which the query sequence is derived, and preferably results upon BLAST back in the query sequence being among the highest hits.

[0618] High-ranking hits are those having a low E-value. The lower the E-value, the more significant the score (or in other words the lower the chance that the hit was found by chance). Computation of the E-value is well known in the art. In addition to E-values, comparisons are also scored by percentage identity. Percentage identity refers to the number of identical nucleotides (or amino acids) between the two compared nucleic acid (or polypeptide) sequences over a particular length. In the case of large families, ClustalW may be used, followed by a neighbour joining tree, to help visualize clustering of related genes and to identify orthologues and paralogues.

[0619] Nucleic acid variants encoding homologues and derivatives of SEQ ID NO: 397 may also be useful in practising the methods of the invention, the terms “homologue” and “derivative” being as defined herein. Also useful in the methods of the invention are nucleic acids encoding homologues and derivatives of orthologues or paralogues of SEQ ID NO: 397. Homologues and derivatives useful in the methods of the present invention have substantially the same biological and functional activity as the unmodified protein from which they are derived.

[0620] Further nucleic acid variants useful in practising the methods of the invention include portions of nucleic acids encoding ASR polypeptides, nucleic acids hybridising to nucleic acids encoding ASR polypeptides, splice variants of nucleic acids encoding ASR polypeptides, allelic variants of nucleic acids encoding ASR polypeptides and variants of nucleic acids encoding ASR polypeptides obtained by gene shuffling. The terms hybridising sequence, splice variant, allelic variant and gene shuffling are as described herein.

[0621] Nucleic acids encoding ASR polypeptides need not be full-length nucleic acids, since performance of the methods of the invention does not rely on the use of full-length nucleic acid sequences. According to the present invention, there is provided a method for enhancing yield-related traits in plants, comprising introducing and expressing in a plant a portion of SEQ ID NO: 396, or a portion of a nucleic acid encoding an orthologue, paralogue or homologue of SEQ ID NO: 397.

[0622] A portion of a nucleic acid may be prepared, for example, by making one or more deletions to the nucleic acid. The portions may be used in isolated form or they may be fused to other coding (or non-coding) sequences in order to, for example, produce a protein that combines several activities. When fused to other coding sequences, the resultant polypeptide produced upon translation may be bigger than that predicted for the protein portion.

[0623] Portions useful in the methods of the invention, encode an ASR polypeptide as defined herein, and have substantially the same biological activity as the amino acid sequences given in SEQ ID NO: 397. Preferably, the portion is a portion of any one of the nucleic acids given in SEQ ID NO: 396, or is a portion of a nucleic acid encoding an orthologue or paralogue of any one of the amino acid sequences given in SEQ ID NO: 396. Preferably the portion is at least 400, 450, 500, 550, 600, 650, 700, 750 consecutive nucleotides in length, the consecutive nucleotides being of SEQ ID NO: 396, or of a nucleic acid encoding an orthologue or paralogue of SEQ ID NO: 397. Most preferably the portion is a portion of the nucleic acid of SEQ ID NO: 396.

[0624] Another nucleic acid variant useful in the methods of the invention is a nucleic acid capable of hybridising, under reduced stringency conditions, preferably under stringent conditions, with a nucleic acid encoding an ASR polypeptide as defined herein, or with a portion as defined herein.

[0625] According to the present invention, there is provided a method for enhancing yield-related traits in plants, comprising introducing and expressing in a plant a nucleic acid capable of hybridizing to SEQ ID NO: 396, or comprising introducing and expressing in a plant a nucleic acid capable of hybridising to a nucleic acid encoding an orthologue, paralogue or homologue of SEQ ID NO: 396.

[0626] Hybridising sequences useful in the methods of the invention encode an ASR polypeptide as defined herein, having substantially the same biological activity as the amino acid sequences given in SEQ ID NO: 397. Preferably, the hybridising sequence is capable of hybridising to SEQ ID NO: 396, or to a portion of any of these sequences, a portion being as defined above, or the hybridising sequence is capable of hybridising to a nucleic acid encoding an orthologue or paralogue of SEQ ID NO: 397.

[0627] Another nucleic acid variant useful in the methods of the invention is a splice variant encoding an ASR polypeptide as defined hereinabove, a splice variant being as defined herein.

[0628] According to the present invention, there is provided a method for enhancing yield-related traits in plants, comprising introducing and expressing in a plant a splice variant of SEQ ID NO: 396, or a splice variant of a nucleic acid encoding an orthologue, paralogue or homologue of SEQ ID NO: 397.

[0629] Another nucleic acid variant useful in performing the methods of the invention is an allelic variant of a nucleic acid encoding an ASR polypeptide as defined hereinabove, an allelic variant being as defined herein.

[0630] According to the present invention, there is provided a method for enhancing yield-related traits in plants, comprising introducing and expressing in a plant an allelic variant of SEQ ID NO: 396, or comprising introducing and expressing in a plant an allelic variant of a nucleic acid encoding an orthologue, paralogue or homologue of the amino acid sequences represented by SEQ ID NO: 397.

[0631] The allelic variants useful in the methods of the present invention have substantially the same biological activity as the ASR polypeptide of SEQ ID NO: 397. Allelic variants exist in nature, and encompassed within the methods of the present invention is the use of these natural alleles. Gene shuffling or directed evolution may also be used to generate variants of nucleic acids encoding ASR polypeptides as defined above; the term “gene shuffling” being as defined herein.

[0632] According to the present invention, there is provided a method for enhancing yield-related traits in plants, comprising introducing and expressing in a plant a variant of SEQ ID NO: 396, or comprising introducing and expressing in a plant a variant of a nucleic acid encoding an orthologue, paralogue or homologue of SEQ ID NO: 397, which variant nucleic acid is obtained by gene shuffling.

[0633] Furthermore, nucleic acid variants may also be obtained by site-directed mutagenesis. Several methods are available to achieve site-directed mutagenesis, the most common being PCR based methods (Current Protocols in Molecular Biology. Wiley Eds.).

[0634] Nucleic acids encoding ASR polypeptides may be derived from any natural or artificial source. The nucleic acid may be modified from its native form in composition and/or genomic environment through deliberate human manipulation. Preferably the ASR polypeptide-encoding nucleic acid is from a plant. In the case of SEQ ID NO: 396, the ASR polypeptide encoding nucleic acid is preferably from a monocotyledonous plant, more preferably from the family Poaceae, most preferably the nucleic acid is from Oryza sativa.

[0635] The invention also provides hitherto unknown ASR-encoding nucleic acids and ASR polypeptides.

[0636] According to a further embodiment of the present invention, there is therefore provided an isolated nucleic acid molecule selected from:
[0637] (i) a nucleic acid represented by any one of SEQ ID NO: 401, 403, 405, 407, 409, 411, 413, 415 and 417;
[0638] (ii) the complement of a nucleic acid represented by any one of SEQ ID NO: 401, 403, 405, 407, 409, 411, 413, 415 and 417;
[0639] (iii) a nucleic acid encoding an ASR polypeptide having, in increasing order of preference, at least 50%, 55%, 60%, 65%, 70%, 75%, 80%, 85%, 90%, 95%, 96%, 97%, 98%, 99% or more sequence identity to the amino acid sequence represented by any one of SEQ ID NO: 402, 404, 406, 408, 410, 412, 414, 416 and 418.

[0640] According to a further embodiment of the present invention, there is also provided an isolated polypeptide selected from:
[0641] (i) an amino acid sequence represented by any one of SEQ ID NO: 402, 404, 406, 408, 410, 412, 414, 416 and 418;
[0642] (ii) an amino acid sequence having, in increasing order of preference, at least 50%, 55%, 60%, 65%, 70%, 75%, 80%, 85%, 90%, 95%, 96%, 97%, 98%, 99% or more sequence identity to the amino acid sequence represented any one of SEQ ID NO: 402, 404, 406, 408, 410, 412, 414, 416 and 418.
[0643] (iii) derivatives of any of the amino acid sequences given in (i) or (ii) above.

[0644] Performance of the methods of the invention gives plants having enhanced yield-related traits. In particular performance of the methods of the invention gives plants having increased early vigour and increased yield, especially increased biomass and increased seed yield relative to control plants. The terms “yield” and “seed yield” are described in more detail in the “definitions” section herein.

[0645] Reference herein to enhanced yield-related traits is taken to mean an increase in early vigour and/or in biomass (weight) of one or more parts of a plant, which may include aboveground (harvestable) parts and/or (harvestable) parts below ground. In particular, such harvestable parts are biomass and/or seeds, and performance of the methods of the invention results in plants having increased early vigour, biomass and/or seed yield relative to the early vigour, biomass or seed yield of control plants.

[0646] Taking corn as an example, a yield increase may be manifested as one or more of the following: increase in the number of plants established per hectare or acre, an increase in the number of ears per plant, an increase in the number of rows, number of kernels per row, kernel weight, thousand kernel weight, ear length/diameter, increase in the seed filling rate (which is the number of filled seeds divided by the total number of seeds and multiplied by 100), among others. Taking rice as an example, a yield increase may manifest itself as an increase in one or more of the following: number of plants per hectare or acre, number of panicles per plant, number of spikelets per panicle, number of flowers (florets) per panicle (which is expressed as a ratio of the number of filled seeds over the number of primary panicles), increase in the seed filling rate (which is the number of filled seeds divided by the total number of seeds and multiplied by 100), increase in thousand kernel weight, among others.

[0647] The present invention provides a method for increasing yield, especially biomass and/or seed yield of plants, relative to control plants, which method comprises modulating expression, preferably increasing expression, in a plant of a nucleic acid encoding an ASR polypeptide as defined herein.

[0648] Since the transgenic plants according to the present invention have increased yield, it is likely that these plants exhibit an increased growth rate (during at least part of their life cycle), relative to the growth rate of control plants at a corresponding stage in their life cycle.

[0649] The increased growth rate may be specific to one or more parts of a plant (including seeds), or may be throughout substantially the whole plant. Plants having an increased growth rate may have a shorter life cycle. The life cycle of a plant may be taken to mean the time needed to grow from a dry mature seed up to the stage where the plant has produced dry mature seeds, similar to the starting material. This life cycle may be influenced by factors such as early vigour, growth rate, greenness index, flowering time and speed of seed maturation. The increase in growth rate may take place at one or more stages in the life cycle of a plant or during substantially the whole plant life cycle. Increased growth rate during the early stages in the life cycle of a plant may reflect enhanced vigour. The increase in growth rate may alter the harvest cycle of a plant allowing plants to be sown later and/or harvested sooner than would otherwise be possible (a similar effect may be obtained with earlier flowering time). If the growth rate is sufficiently increased, it may allow for the further sowing of seeds of the same plant species (for example sowing and harvesting of rice plants followed by sowing and harvesting of further rice plants all within one conventional growing period). Similarly, if the growth rate is sufficiently increased, it may allow for the further sowing of seeds of different plants species (for example the sowing and harvesting of corn plants followed by, for example, the sowing and optional harvesting of soybean, potato or any other suitable plant). Harvesting additional times from the same rootstock in the case of some crop plants may also be possible. Altering the harvest cycle of a plant may lead to an increase in annual biomass production per acre (due to an increase in the number of times (say in a year) that any particular plant may be grown and harvested). An increase in growth rate may also allow for the cultivation of transgenic plants in a wider geographical area than their wild-type counterparts, since the territorial limitations for growing a crop are often determined by adverse environmental conditions either at the time of planting (early season) or at the time of harvesting (late season). Such adverse conditions may be avoided if the harvest cycle is shortened. The growth rate may be determined by deriving various parameters from growth curves, such parameters may be: T-Mid (the time taken for plants to reach 50% of their maximal size) and T-90 (time taken for plants to reach 90% of their maximal size), amongst others.

[0650] According to a preferred feature of the present invention, performance of the methods of the invention gives plants having an increased growth rate relative to control plants. Therefore, according to the present invention, there is provided a method for increasing the growth rate of plants, which method comprises modulating expression, preferably increasing expression, in a plant of a nucleic acid encoding an ASR polypeptide as defined herein. In a particular embodiment, performance of the methods of the present invention gives plants with increased early vigour.

[0651] An increase in yield and/or growth rate occurs whether the plant is under non-stress conditions or whether the plant is exposed to various stresses compared to control plants. Plants typically respond to exposure to stress by growing more slowly. In conditions of severe stress, the plant may even stop growing altogether. Mild stress on the other hand is defined herein as being any stress to which a plant is exposed which does not result in the plant ceasing to grow altogether without the capacity to resume growth. Mild stress in the sense of the invention leads to a reduction in the growth of the stressed plants of less than 40%, 35% or 30%, preferably less than 25%, 20% or 15%, more preferably less than 14%, 13%, 12%, 11% or 10% or less in comparison to the control plant under non-stress conditions. Due to advances in agricultural practices (irrigation, fertilization, pesticide treatments) severe stresses are not often encountered in cultivated crop plants. As a consequence, the compromised growth induced by mild stress is often an undesirable feature for agriculture. Mild stresses are the everyday biotic and/or abiotic (environmental) stresses to which a plant is exposed. Abiotic stresses may be due to drought or excess water, anaerobic stress, salt stress, chemical toxicity, oxidative stress and hot, cold or freezing temperatures. The abiotic stress may be an osmotic stress caused by a water stress (particularly due to drought), salt stress, oxidative stress or an ionic stress. Biotic stresses are typically those stresses caused by pathogens, such as bacteria, viruses, fungi and insects.

[0652] In particular, the methods of the present invention may be performed under non-stress conditions or under conditions of mild drought to give plants having increased yield relative to control plants. As reported in Wang et al. (Planta (2003) 218: 1-14), abiotic stress leads to a series of morphological, physiological, biochemical and molecular changes that adversely affect plant growth and productivity. Drought, salinity, extreme temperatures and oxidative stress are known to be interconnected and may induce growth and cellular damage through similar mechanisms. Rabbani et al. (Plant Physiol (2003) 133: 1755-1767) describes a particularly high degree of “cross talk” between drought stress and high-salinity stress. For example, drought and/or salinisation are manifested primarily as osmotic stress, resulting in the disruption of homeostasis and ion distribution in the cell. Oxidative stress, which frequently accompanies high or low temperature, salinity or drought stress, may cause denaturing of functional and structural proteins. As a consequence, these diverse environmental stresses often activate similar cell signalling pathways and cellular responses, such as the production of stress proteins, up-regulation of anti-oxidants, accumulation of compatible solutes and growth arrest. The term “non-stress” conditions as used herein are those environmental conditions that allow optimal growth of plants. Persons skilled in the art are aware of normal soil conditions and climatic conditions for a given location. Plants with optimal growth conditions, (grown under non-stress conditions) typically yield in increasing order of preference at least 90%, 87%, 85%, 83%, 80%, 77% or 75% of the average production of such plant in a given environment. Average production may be calculated on harvest and/or season basis. Persons skilled in the art are aware of average yield productions of a crop.

[0653] Performance of the methods of the invention gives plants grown under non-stress conditions or under mild drought conditions increased yield and/or increased early vigour, relative to control plants grown under comparable conditions. Therefore, according to the present invention, there is provided a method for increasing yield and/or early vigour in plants grown under non-stress conditions or under mild drought conditions, which method comprises increasing expression in a plant of a nucleic acid encoding an ASR polypeptide.

[0654] Performance of the methods of the invention gives plants grown under conditions of nutrient deficiency, particularly under conditions of nitrogen deficiency, increased yield relative to control plants grown under comparable conditions. Therefore, according to the present invention, there is provided a method for increasing yield in plants grown under conditions of nutrient deficiency, which method comprises increasing expression in a plant of a nucleic acid encoding an ASR polypeptide. Nutrient deficiency may result from a lack of nutrients such as nitrogen, phosphates and other phosphorous-containing compounds, potassium, calcium, cadmium, magnesium, manganese, iron and boron, amongst others.

[0655] The present invention encompasses plants or parts thereof (including seeds) obtainable by the methods according to the present invention. The plants or parts thereof comprise a nucleic acid transgene encoding an ASR polypeptide as defined above.

[0656] The invention also provides genetic constructs and vectors to facilitate introduction and/or expression in plants of nucleic acids encoding ASR polypeptides. The gene constructs may be inserted into vectors, which may be commercially available, suitable for transforming into plants and suitable for expression of the gene of interest in the transformed cells. The invention also provides use of a gene construct as defined herein in the methods of the invention.

[0657] More specifically, the present invention provides a construct comprising:
[0658] (a) a nucleic acid encoding an ASR polypeptide as defined above;
[0659] (b) one or more control sequences capable of driving expression of the nucleic acid sequence of (a); and optionally
[0660] (c) a transcription termination sequence.

[0661] Preferably, the nucleic acid encoding an ASR polypeptide is as defined above. The term “control sequence” and “termination sequence” are as defined herein.

[0662] Plants are transformed with a vector comprising any of the nucleic acids described above. The skilled artisan is well aware of the genetic elements that must be present on the vector in order to successfully transform, select and propagate host cells containing the sequence of interest. The sequence of interest is operably linked to one or more control sequences (at least to a promoter).

[0663] Advantageously, any type of promoter, whether natural or synthetic, may be used to drive expression of the nucleic acid sequence. A constitutive promoter is particularly useful in the methods of the invention. See the “Definitions” section herein for definitions of the various promoter types.

[0664] It should be clear that the applicability of the present invention is not restricted to the ASR polypeptide-encoding nucleic acid represented by SEQ ID NO: 396, nor is the applicability of the invention restricted to expression of an ASR polypeptide-encoding nucleic acid when driven by a constitutive specific promoter.

[0665] The constitutive promoter is preferably a GOS2 promoter, preferably a GOS2 promoter from rice. Further preferably the constitutive promoter is represented by a nucleic acid sequence substantially similar to SEQ ID NO: 398, most preferably the constitutive promoter is as represented by SEQ ID NO: 398. See the “Definitions” section herein for further examples of constitutive promoters.

[0666] Optionally, one or more terminator sequences may be used in the construct introduced into a plant. Additional regulatory elements may include transcriptional as well as translational enhancers. Those skilled in the art will be aware of terminator and enhancer sequences that may be suitable for use in performing the invention. An intron sequence may also be added to the 5′ untranslated region (UTR) or in the coding sequence to increase the amount of the mature message that accumulates in the cytosol, as described in the definitions section. Other control sequences (besides promoter, enhancer, silencer, intron sequences, 3′ UTR and/or 5′ UTR regions) may be protein and/or RNA stabilizing elements. Such sequences would be known or may readily be obtained by a person skilled in the art.

[0667] The genetic constructs of the invention may further include an origin of replication sequence that is required for maintenance and/or replication in a specific cell type. One example is when a genetic construct is required to be maintained in a bacterial cell as an episomal genetic element (e.g. plasmid or cosmid molecule). Preferred origins of replication include, but are not limited to, the f1-ori and colE1.

[0668] For the detection of the successful transfer of the nucleic acid sequences as used in the methods of the invention and/or selection of transgenic plants comprising these nucleic acids, it is advantageous to use marker genes (or reporter genes). Therefore, the genetic construct may optionally comprise a selectable marker gene. Selectable markers are described in more detail in the “definitions” section herein. The marker genes may be removed or excised from the transgenic cell once they are no longer needed. Techniques for marker removal are known in the art, useful techniques are described above in the definitions section.

[0669] The invention also provides a method for the production of transgenic plants having enhanced yield-related traits relative to control plants, comprising introduction and expression in a plant of any nucleic acid encoding an ASR polypeptide as defined hereinabove.

[0670] More specifically, the present invention provides a method for the production of transgenic plants having increased enhanced yield-related traits, particularly increased early vigour and/or increased yield, which method comprises:
[0671] (i) introducing and expressing in a plant or plant cell an ASR polypeptide-encoding nucleic acid; and
[0672] (ii) cultivating the plant cell under conditions promoting plant growth and development.

[0673] The nucleic acid of (i) may be any of the nucleic acids capable of encoding an ASR polypeptide as defined herein.

[0674] The nucleic acid may be introduced directly into a plant cell or into the plant itself (including introduction into a tissue, organ or any other part of a plant). According to a preferred feature of the present invention, the nucleic acid is preferably introduced into a plant by transformation. The term “transformation” is described in more detail in the “definitions” section herein.

[0675] The genetically modified plant cells can be regenerated via all methods with which the skilled worker is familiar. Suitable methods can be found in the abovementioned publications by S. D. Kung and R. Wu, Potrykus or Hofgen and Willmitzer.

[0676] Generally after transformation, plant cells or cell groupings are selected for the presence of one or more markers which are encoded by plant-expressible genes co-transferred with the gene of interest, following which the transformed material is regenerated into a whole plant. To select transformed plants, the plant material obtained in the transformation is, as a rule, subjected to selective conditions so that transformed plants can be distinguished from untransformed plants. For example, the seeds obtained in the above-described manner can be planted and, after an initial growing period, subjected to a suitable selection by spraying. A further possibility consists in growing the seeds, if appropriate after sterilization, on agar plates using a suitable selection agent so that only the transformed seeds can grow into plants. Alternatively, the transformed plants are screened for the presence of a selectable marker such as the ones described above.

[0677] Following DNA transfer and regeneration, putatively transformed plants may also be evaluated, for instance using Southern analysis, for the presence of the gene of interest, copy number and/or genomic organisation. Alternatively or additionally, expression levels of the newly introduced DNA may be monitored using Northern and/or Western analysis, both techniques being well known to persons having ordinary skill in the art.

[0678] The generated transformed plants may be propagated by a variety of means, such as by clonal propagation or classical breeding techniques. For example, a first generation (or T1) transformed plant may be selfed and homozygous second-generation (or T2) transformants selected, and the T2 plants may then further be propagated through classical breeding techniques. The generated transformed organisms may take a variety of forms. For example, they may be chimeras of transformed cells and non-transformed cells; clonal transformants (e.g., all cells transformed to contain the expression cassette); grafts of transformed and untransformed tissues (e.g., in plants, a transformed rootstock grafted to an untransformed scion).

[0679] The present invention clearly extends to any plant cell or plant produced by any of the methods described herein, and to all plant parts and propagules thereof. The present invention extends further to encompass the progeny of a primary transformed or transfected cell, tissue, organ or whole plant that has been produced by any of the aforementioned methods, the only requirement being that progeny exhibit the same genotypic and/or phenotypic characteristic(s) as those produced by the parent in the methods according to the invention.

[0680] The invention also includes host cells containing an isolated nucleic acid encoding an ASR polypeptide as defined hereinabove. Preferred host cells according to the invention are plant cells. Host plants for the nucleic acids or the vector used in the method according to the invention, the expression cassette or construct or vector are, in principle, advantageously all plants, which are capable of synthesizing the polypeptides used in the inventive method.

[0681] The methods of the invention are advantageously applicable to any plant. Plants that are particularly useful in the methods of the invention include all plants which belong to the superfamily Viridiplantae, in particular monocotyledonous and dicotyledonous plants including fodder or forage legumes, ornamental plants, food crops, trees or shrubs. According to a preferred embodiment of the present invention, the plant is a crop plant. Examples of crop plants include soybean, sunflower, canola, alfalfa, rapeseed, cotton, tomato, potato and tobacco. Further preferably, the plant is a monocotyledonous plant. Examples of monocotyledonous plants include sugarcane. More preferably the plant is a cereal. Examples of cereals include rice, maize, wheat, barley, millet, rye, triticale, sorghum and oats.

[0682] The invention also extends to harvestable parts of a plant such as, but not limited to seeds, leaves, fruits, flowers, stems, roots, rhizomes, tubers and bulbs. The invention furthermore relates to products derived, preferably directly derived, from a harvestable part of such a plant, such as dry pellets or powders, oil, fat and fatty acids, starch or proteins.

[0683] According to a preferred feature of the invention, the modulated expression is increased expression. Methods for increasing expression of nucleic acids or genes, or gene products, are well documented in the art and examples are provided in the definitions section.

[0684] As mentioned above, a preferred method for modulating (preferably, increasing) expression of a nucleic acid encoding an ASR polypeptide is by introducing and expressing in a plant a nucleic acid encoding an ASR polypeptide; however the effects of performing the method, i.e. enhancing yield-related traits may also be achieved using other well known techniques, including but not limited to T-DNA activation tagging, TILLING, homologous recombination. A description of these techniques is provided in the definitions section.

[0685] The present invention also encompasses use of nucleic acids encoding ASR polypeptides as described herein and use of these ASR polypeptides in enhancing any of the aforementioned yield-related traits in plants.

[0686] Nucleic acids encoding ASR polypeptide described herein, or the ASR polypeptides themselves, may find use in breeding programmes in which a DNA marker is identified which may be genetically linked to an ASR polypeptide-encoding gene. The nucleic acids/genes, or the ASR polypeptides themselves may be used to define a molecular marker. This DNA or protein marker may then be used in breeding programmes to select plants having enhanced yield-related traits as defined hereinabove in the methods of the invention.

[0687] Allelic variants of an ASR polypeptide-encoding nucleic acid/gene may also find use in marker-assisted breeding programmes. Such breeding programmes sometimes require introduction of allelic variation by mutagenic treatment of the plants, using for example EMS mutagenesis; alternatively, the programme may start with a collection of allelic variants of so called “natural” origin caused unintentionally. Identification of allelic variants then takes place, for example, by PCR. This is followed by a step for selection of superior allelic variants of the sequence in question and which give increased yield. Selection is typically carried out by monitoring growth performance of plants containing different allelic variants of the sequence in question. Growth performance may be monitored in a greenhouse or in the field. Further optional steps include crossing plants in which the superior allelic variant was identified with another plant. This could be used, for example, to make a combination of interesting phenotypic features.

[0688] Nucleic acids encoding ASR polypeptides may also be used as probes for genetically and physically mapping the genes that they are a part of, and as markers for traits linked to those genes. Such information may be useful in plant breeding in order to develop lines with desired phenotypes. Such use of ASR polypeptide-encoding nucleic acids requires only a nucleic acid sequence of at least 15 nucleotides in length. The ASR polypeptide-encoding nucleic acids may be used as restriction fragment length polymorphism (RFLP) markers. Southern blots (Sambrook J, Fritsch E F and Maniatis T (1989) Molecular Cloning, A Laboratory Manual) of restriction-digested plant genomic DNA may be probed with the ASR-encoding nucleic acids. The resulting banding patterns may then be subjected to genetic analyses using computer programs such as MapMaker (Lander et al. (1987) Genomics 1: 174-181) in order to construct a genetic map. In addition, the nucleic acids may be used to probe Southern blots containing restriction endonuclease-treated genomic DNAs of a set of individuals representing parent and progeny of a defined genetic cross. Segregation of the DNA polymorphisms is noted and used to calculate the position of the ASR polypeptide-encoding nucleic acid in the genetic map previously obtained using this population (Botstein et al. (1980) Am. J. Hum. Genet. 32:314-331).

[0689] The production and use of plant gene-derived probes for use in genetic mapping is described in Bernatzky and Tanksley (1986) Plant Mol. Biol. Reporter 4: 37-41. Numerous publications describe genetic mapping of specific cDNA clones using the methodology outlined above or variations thereof. For example, F2 intercross populations, backcross populations, randomly mated populations, near isogenic lines, and other sets of individuals may be used for mapping. Such methodologies are well known to those skilled in the art.

[0690] The nucleic acid probes may also be used for physical mapping (i.e., placement of sequences on physical maps; see Hoheisel et al. In: Non-mammalian Genomic Analysis: A Practical Guide, Academic press 1996, pp. 319-346, and references cited therein).

[0691] In another embodiment, the nucleic acid probes may be used in direct fluorescence in situ hybridisation (FISH) mapping (Trask (1991) Trends Genet. 7:149-154). Although current methods of FISH mapping favour use of large clones (several kb to several hundred kb; see Laan et al. (1995) Genome Res. 5:13-20), improvements in sensitivity may allow performance of FISH mapping using shorter probes.

[0692] A variety of nucleic acid amplification-based methods for genetic and physical mapping may be carried out using the nucleic acids. Examples include allele-specific amplification (Kazazian (1989) J. Lab. Clin. Med 11:95-96), polymorphism of PCR-amplified fragments (CAPS; Sheffield et al. (1993) Genomics 16:325-332), allele-specific ligation (Landegren et al. (1988) Science 241:1077-1080), nucleotide extension reactions (Sokolov (1990) Nucleic Acid Res. 18:3671), Radiation Hybrid Mapping (Walter et al. (1997) Nat. Genet. 7:22-28) and Happy Mapping (Dear and Cook (1989) Nucleic Acid Res. 17:6795-6807). For these methods, the sequence of a nucleic acid is used to design and produce primer pairs for use in the amplification reaction or in primer extension reactions. The design of such primers is well known to those skilled in the art. In methods employing PCR-based genetic mapping, it may be necessary to identify DNA sequence differences between the parents of the mapping cross in the region corresponding to the instant nucleic acid sequence. This, however, is generally not necessary for mapping methods.

[0693] The methods according to the present invention result in plants having enhanced yield-related traits, as described hereinbefore. These traits may also be combined with other economically advantageous traits, such as further yield-enhancing traits, tolerance to other abiotic and biotic stresses, traits modifying various architectural features and/or biochemical and/or physiological features.

### VII. Squamosa Promoter Binding Protein-Like 11 (SPL11) Transcription Factor Polypeptide

[0694] Surprisingly, it has now been found that modulating expression in a plant of a nucleic acid encoding a SPL11 polypeptide gives plants having enhanced yield-related traits relative to control plants. According to a first embodiment, the present invention provides a method for enhancing yield-related traits in plants relative to control plants, comprising modulating expression in a plant of a nucleic acid encoding a SPL11 polypeptide.

[0695] The present invention also provides hitherto unknown SPL11-encoding nucleic acids and SPL11 polypeptides. These sequences also being useful in performing the methods of the invention.

[0696] Therefore according to a further embodiment of the present invention there is provided an isolated nucleic acid molecule comprising:
[0697] (i) a nucleic acid represented by SEQ ID NO: 448;
[0698] (ii) the complement of a nucleic acid represented by SEQ ID NO: 448;
[0699] (iii) a nucleic acid encoding a SPL11 polypeptide having, in increasing order of preference, at least 70%, 75%, 80%, 85%, 90%, 95%, 96%, 97%, 98%, 99% or more sequence identity to the amino acid sequence represented by SEQ ID NO: 449, and having in increasing order of preference at least 70%, 75%, 80%, 85%, 90%, 95%, 96%, 97%, 98%, 99% or more sequence identity to SEQ ID NO: 465: SYCQVEGCRTDLSSAKDYHRKHRVCEPHSKAPKVVVAGLERRFC QQCSRFHGLAEFDQKKKSCRRRLNDHNARRRKPQPEAL (which represents the SBP domain in SEQ ID NO: 449);
[0700] (iv) a nucleic acid hybridising under stringent conditions to SEQ ID NO: 448.

[0701] Furthermore, there is also provided an isolated polypeptide comprising:
[0702] (i) an amino acid sequence represented by SEQ ID NO: 449;
[0703] (ii) an amino acid sequence having, in increasing order of preference, at least 70%, 75%, 80%, 85%, 90%, 95%, 96%, 97%, 98%, 99% or more sequence identity to the amino acid sequence represented by SEQ ID NO: 449, and having in increasing order of preference at least 70%, 75%, 80%, 85%, 90%, 95%, 96%, 97%, 98%, 99% or more sequence identity to SEQ ID NO: 465: SYCQVEGCRTDLSSAKDYHRKHRVCEPHSKAPKVVVAGLERRFCQQCSRFHG LAEFDQKKKSCRRRLNDHNARRRKPQPEAL (which represents the SBP domain in SEQ ID NO: 449).
[0704] (iii) derivatives of any of the amino acid sequences given in (i) or (ii) above.

[0705] A preferred method for modulating (preferably, increasing) expression of a nucleic acid encoding a SPL11 polypeptide is by introducing and expressing in a plant a nucleic acid encoding a SPL11 polypeptide.

[0706] Any reference hereinafter to a “protein useful in the methods of the invention” is taken to mean a SPL11 polypeptide as defined herein. Any reference hereinafter to a “nucleic acid useful in the methods of the invention” is taken to mean a nucleic acid capable of encoding such a SPL11 polypeptide. The nucleic acid to be introduced into a plant (and therefore useful in performing the methods of the invention) is any nucleic acid encoding the type of protein which will now be described, herein also named “SPL11 nucleic acid” or “SPL11 gene”.

[0707] A SPL11 polypeptide as defined herein refers to a polypeptide comprising a Squamosa Binding Protein (SBP) domain, such domain having in increasing order of preference at least 70%, 75%, 80%, 85%, 90%, 95%, 97% or more sequence identity to any one of the SBP domains as represented by SEQ ID NO: 456 to SEQ ID NO: 468 or SEQ ID NO: 478.

[0708] An “SPL11 polypeptide” as defined herein comprises the protein represented by SEQ ID NO: 448 which identical to SEQ ID NO: 172 and to homologues (orthologues and paralogues) thereof. Preferably, the homologues of SEQ ID NO: 172 have a DNA binding domain.

[0709] SPL11 polypeptides can be found in specialized databases such as Pfam, (Finn et al. Nucleic Acids Research (2006) Database Issue 34:D247-D251). Pfam compiles a large collection of multiple sequence alignments and hidden Markov models (HMM) covering many common protein domains and families and is available through the Sanger Institute in the United Kingdom.

[0710] The gathering cutoff threshold of the SBP domain in the Pfam HMM_fs and Pfam HMM_ls models is 25.0. Trusted matches as considered in the Pfam database are those sequences scoring higher than the gathering cut-off threshold. However potential matches, comprising true SBP domains, may still fall under the gathering cut-off. Preferably a SPL11 polypeptide is a protein having one or more domains in their sequence that exceed the gathering cutoff of the Pfam protein domain family PF03110, known as SBP domain.

[0711] Alternatively, a SBP domain in a polypeptide may be identified by performing a sequence comparison with known polypeptides comprising a SBP domain and establishing the similarity in the region of the SBP domain. The sequences may be aligned using any of the methods well known in the art such as Blast algorithms. The probability for the alignment to occur with a given sequence is taken as basis for identifying similar polypeptides. A parameter that is typically used to represent such probability is called e-value. The E-value is a measure of the reliability of the S score. The S score is a measure of the similarity of the query to the sequence shown. The e-value describes how often a given S score is expected to occur at random. The e-value cut-off may be as high as 1.0. The typical threshold for a good e-value from a BLAST search output using an SPL11 polypeptide as query sequence can is lower than e⁵(═10⁻⁵), 1.e⁻¹⁰, 1.e⁻¹⁵, 1.e⁻²⁰, 1.e⁻²⁵, 1.e⁻⁵⁰, 1.e⁻⁷⁵, 1.e⁻¹⁰⁰, 1.e⁻²⁰⁰, 1.e⁻³⁰⁰, 1.e⁻⁴⁰⁰, 1.e⁻⁵⁰⁰, 1.e⁻⁶⁰⁰, 1.e⁻⁷⁰⁰ and 1.e⁻⁸⁰⁰. Preferably SPL11 polypeptides of the invention comprise a sequence having in increasing order of preference an e-value lower than e⁻⁵(=10⁻⁵), 1.e⁻¹⁰, 1.e⁻¹⁵, 1.e⁻²⁰, 1.e⁻²⁵, 1.e⁻⁵⁰, 1.e⁻⁷⁵, 1.e⁻¹⁰⁰, 1.e⁻²⁰⁰, 1.e⁻³⁰⁰, 1.e⁻⁴⁰⁰, 1.e⁻⁵⁰⁰, 1.e⁻⁶⁰⁰, 1.e−700 and 1.e⁻⁸⁰⁰ in an alignment with a SBP domain found in a known SPL11 polypeptide.

[0712] Examples of SPL11 polypeptides useful in the methods of the invention are given in Table G1. The amino acid coordinates of the SBP domain in the representative SPL11 protein of Table G1 are given in Table G4 and the domain sequence is represented by SEQ ID NO: 456 to SEQ ID NO: 468. A consensus sequence of the SBP domains present in SPL11 polypeptides is given in SEQ ID NO: 478.

[0713] Preferred SPL11 polypeptides of the invention are those having in increasing order of preference at least 70%, 75%, 80%, 85%, 90%, 95%, or more sequence identity to any of the polypeptides given in Table G2.

[0714] Typically SPL11 polypeptides may comprise in addition to the SBP domain one or more of the following conserved motifs at conserved positions in the sequence relative to the SBP domain: (i) Motif 1 as represented by SEQ ID NO: 469, (ii) Motif 2 is a serine rich region typically found at the N-terminal end of the SBP domain and can be represented by SEQ ID NO: 470; (iii) Motif 3 as presented by SEQ ID: 471 which is typically encoded by nucleotides comprised within the SPL11 polynucleotide region targeted by members of the miR156 microRNA family; (iv) Motif 4 as represented by SEQ ID NO: 472. FIG. 27 shows the conserved motifs and their relative position in the SPL11 polypeptide sequence represented by SEQ ID NO: 428.

[0715] Therefore, preferred SPL11 polypeptides useful in the method of the invention, comprise in addition to the SBP domain any one or more of the following conserved motifs:
[0716] (i) Motif 1 as represented by SEQ ID NO: 469 wherein any conservative amino acid substitution and/or 1 or 2 non conservative substitutions are allowed,
[0717] (ii) Motif 2 as represented by SEQ ID NO: 470 wherein any amino acid substitution is allowed, provided that at least 4 amino acids have a polar side chain, preferably serine or threonine, and provided that this motif is located at the N-terminal end of the SBP domain;
[0718] (iii) Motif 3 as represented by SEQ ID: 471, wherein 1 or 2 mismatches are allowed;
[0719] (iv) Motif 4 as represented by SEQ ID: 472, wherein 1, 2 or 3 mismatches are allowed.

[0720] Examples of conservative amino acid substitutions are given in the background section. Typically amino acids comprised in polypeptides are alpha amino acids having an amine and a carboxyl group attached to the same carbon, the alpha carbon, which amino acid molecules often comprise a side chain attached to the alpha carbon. Table 3 shows the classification of amino acids based on the physical and biochemical properties of the side chain.

TABLE 3
Classification of amino acids according to the side chain properties.

| | | | Side | Side chain | |
|---|---|---|---|---|---|
| | | | chain | acidity | Hydropathy |
| Amino Acid | 3-Letter | 1-Letter | polarity | or basicity | index |
| Arginine | Arg | R | polar | basic | −4.5 |
| Asparagine | Asn | N | polar | neutral | −3.5 |
| Aspartic acid | Asp | D | polar | acidic | −3.5 |
| Cysteine | Cys | C | polar | neutral | 2.5 |
| Glutamic acid | Glu | E | polar | acidic | −3.5 |
| Glutamine | Gln | Q | polar | neutral | −3.5 |
| Histidine | His | H | polar | basic | −3.2 |
| Lysine | Lys | K | polar | basic | −3.9 |
| Serine | Ser | S | polar | neutral | −0.8 |
| Threonine | Thr | T | polar | neutral | −0.7 |
| Tyrosine | Tyr | Y | polar | neutral | −1.3 |
| Alanine | Ala | A | nonpolar | neutral | 1.8 |
| Glycine | Gly | G | nonpolar | neutral | −0.4 |
| Isoleucine | Ile | I | nonpolar | neutral | 4.5 |
| Leucine | Leu | L | nonpolar | neutral | 3.8 |
| Methionine | Met | M | nonpolar | neutral | 1.9 |
| Phenylalanine | Phe | F | nonpolar | neutral | 2.8 |
| Proline | Pro | P | nonpolar | neutral | −1.6 |
| Tryptophan | Trp | W | nonpolar | neutral | −0.9 |
| Valine | Val | V | nonpolar | neutral | 4.2 |

[0721] Examples of SPL11 polypeptides comprising one or more of the conserved motifs Motif 1 to Motif 4 are given in Example 62. FIG. 28 shows the position of the conserved motifs in those SPL11 polypeptides.

[0722] Preferably, the SPL11 polypeptide of the invention when used in the construction of a phylogenetic tree, such as the one depicted in FIG. 29, clusters within the S3 group comprising the amino acid sequence represented by SEQ ID NO: 428 (named AtSPL11 in FIG. 29) rather than with any other group.

[0723] The term “domain” and “motif” is defined in the “definitions” section herein. Specialist databases exist for the identification of domains, for example, SMART (Schultz et al. (1998) Proc. Natl. Acad. Sci. USA 95, 5857-5864; Letunic et al. (2002) Nucleic Acids Res 30, 242-244, InterPro (Mulder et al., (2003) Nucl. Acids. Res. 31, 315-318, Prosite (Bucher and Bairoch (1994), A generalized profile syntax for biomolecular sequences motifs and its function in automatic sequence interpretation. (In) ISMB-94; Proceedings 2nd International Conference on Intelligent Systems for Molecular Biology. Altman R., Brutlag D., Karp P., Lathrop R., Searls D., Eds., pp53-61, AAAI Press, Menlo Park; Hulo et al., Nucl. Acids. Res. 32:D134-D137, (2004), or Pfam (Bateman et al., Nucleic Acids Research 30(1): 276-280 (2002). A set of tools for in silico analysis of protein sequences is available on the ExPASy proteomics server (Swiss Institute of Bioinformatics (Gasteiger et al., ExPASy: the proteomics server for in-depth protein knowledge and analysis, Nucleic Acids Res. 31:3784-3788(2003)). Domains may also be identified using routine techniques, such as by sequence alignment.

[0724] Methods for the alignment of sequences for comparison are well known in the art, such methods include GAP, BESTFIT, BLAST, FASTA and TFASTA. GAP uses the algorithm of Needleman and Wunsch ((1970) J Mol Biol 48: 443-453) to find the global (i.e. spanning the complete sequences) alignment of two sequences that maximizes the number of matches and minimizes the number of gaps. The BLAST algorithm (Altschul et al. (1990) J Mol Biol 215: 403-10) calculates percent sequence identity and performs a statistical analysis of the similarity between the two sequences. The software for performing BLAST analysis is publicly available through the National Centre for Biotechnology Information (NCBI). Homologues may readily be identified using, for example, the ClustalW multiple sequence alignment algorithm (version 1.83), with the default pairwise alignment parameters, and a scoring method in percentage. Global percentages of similarity and identity may also be determined using one of the methods available in the MatGAT software package (Campanella et al., BMC Bioinformatics. 2003 Jul. 10; 4:29. MatGAT: an application that generates similarity/identity matrices using protein or DNA sequences.). Minor manual editing may be performed to optimise alignment between conserved motifs, as would be apparent to a person skilled in the art. Furthermore, instead of using full-length sequences for the identification of homologues, specific domains may also be used. The sequence identity values may be determined over the entire nucleic acid or amino acid sequence or over selected domains or conserved motif(s), using the programs mentioned above using the default parameters.

[0725] Furthermore, SPL11 polypeptides (at least in their native form) may typically have DNA binding activity, in particular they may bind DNA fragments comprising the SBP domain DNA binding box as represented by SEQ ID NO: 49. Typically the SBP domain DNA binding box is found in gene promoters of plant origin such as the SQUAMOSA gene. Fragments comprising the SBP domain DNA binding box are preferably more than 10, 15, 20, 25, 100, 200, 500, 1000, 2000 base pairs long. Methods to determine DNA binding of SBP domain containing proteins are applicable to SPL11 polypeptides and are known in the art (Klein at al. Mol Gen Genet. 1996, 15; 250(1):7-16; Yamasaki et al. 2004 J Mol Biol. 2004, 12; 337(1):49-63).

[0726] Preferred SPL11 polypeptides of the invention are those having DNA binding activity, more preferably those binding a DNA fragment comprising SEQ ID NO: 475.

[0727] The present invention is illustrated by transforming plants with the nucleic acid sequence represented by SEQ ID NO: 427, encoding the polypeptide sequence of SEQ ID NO: 428. However, performance of the invention is not restricted to these sequences; the methods of the invention may advantageously be performed using any SPL11 encoding nucleic acid or SPL11 polypeptide as defined herein.

[0728] Examples of nucleic acids encoding SPL11 polypeptides are given in Table G1 of Example 62 herein. Such nucleic acids are useful in performing the methods of the invention. The amino acid sequences given in Table G1 of Example 62 are example sequences of orthologues and paralogues of the SPL11 polypeptide represented by SEQ ID NO: 428, the terms “orthologues” and “paralogues” being as defined herein. Further orthologues and paralogues may readily be identified by performing a so-called reciprocal blast search. Typically, this involves a first BLAST involving BLASTing a query sequence (for example using any of the sequences listed in Table G1 of Example 62) against any sequence database, such as the publicly available NCBI database. BLASTN or TBLASTX (using standard default values) are generally used when starting from a nucleotide sequence, and BLASTP or TBLASTN (using standard default values) when starting from a protein sequence. The BLAST results may optionally be filtered. The full-length sequences of either the filtered results or non-filtered results are then BLASTed back (second BLAST) against sequences from the organism from which the query sequence is derived (where the query sequence is SEQ ID NO: 427 or SEQ ID NO: 428, the second BLAST would therefore be against Arabidopsis sequences). The results of the first and second BLASTs are then compared. A paralogue is identified if a high-ranking hit from the first blast is from the same species as from which the query sequence is derived, a BLAST back then ideally results in the query sequence amongst the highest hits; an orthologue is identified if a high-ranking hit in the first BLAST is not from the same species as from which the query sequence is derived, and preferably results upon BLAST back in the query sequence being among the highest hits.

[0729] High-ranking hits are those having a low E-value. The lower the E-value, the more significant the score (or in other words the lower the chance that the hit was found by chance). Computation of the E-value is well known in the art. In addition to E-values, comparisons are also scored by percentage identity. Percentage identity refers to the number of identical nucleotides (or amino acids) between the two compared nucleic acid (or polypeptide) sequences over a particular length. In the case of large families, ClustalW may be used, followed by a neighbour joining tree, to help visualize clustering of related genes and to identify orthologues and paralogues.

[0730] Nucleic acid variants may also be useful in practising the methods of the invention. Examples of such variants include nucleic acids encoding homologues and derivatives of any one of the amino acid sequences given in Table G1 of Example 62, the terms “homologue” and “derivative” being as defined herein. Also useful in the methods of the invention are nucleic acids encoding homologues and derivatives of orthologues or paralogues of any one of the amino acid sequences given in Table G1 of Example 62. Homologues and derivatives useful in the methods of the present invention have substantially the same biological and functional activity as the unmodified protein from which they are derived.

[0731] Further nucleic acid variants useful in practising the methods of the invention include portions of nucleic acids encoding SPL11 polypeptides, nucleic acids hybridising to nucleic acids encoding SPL11 polypeptides, splice variants of nucleic acids encoding SPL11 polypeptides, allelic variants of nucleic acids encoding SPL11 polypeptides and variants of nucleic acids encoding SPL11 polypeptides obtained by gene shuffling. The terms hybridising sequence, splice variant, allelic variant and gene shuffling are as described herein.

[0732] A preferred nucleic acid variant useful in practising the methods of the invention is a nucleic acid encoding a SPL11 polypeptide, which is microRNA insensitive, further preferably the nucleic acid is insensitive to microRNAs belonging to the miR156 family. MicroRNAs target nucleic acids (RNA in particular) for destruction typically causing a reduction or inhibition of the accumulation of the targeted RNA. Targeting requires hybridisation between the microRNA and the targeted nucleic acid (RNA) in a very specific region, called the miR (microRNA) target site, which comprises a sequence complementary to a portion of the mature microRNA gene. Typically microRNA insensitive nucleic acids comprise a sequence having in increasing order of preference 1, 2, 3, 4, 5 or more mistmatches in an alignment to the relevant microRNA molecule in the miR target site. MicroRNA insensitive nucleic acids may accumulated in a cell to levels in increasing order of preference 5, 10, 20, 30, 40, 50 times or higher than the corresponding nucleic acid targeted by the relevant MicroRNA, which typically comprises 100% sequence complementary in the miR target site.

[0733] The miR156 family has been described earlier and a compilation of the microRNAs including the miR156 family members can be found at miRBase database (Griffiths-Jones et al. 2006 Nucleic Acids Research, 2006, Vol. 34, Database issue D140-D144). The miRBase database is maintained by the The Wellcome Trust Sanger Institute, in Cambridge, UK. The miR156 target site in a SPL11 nucleic acid is complementary to the mature sequence of miR156 microRNAs. An example of mature sequences of the miR156 family members from rice and their corresponding target sites on rice SPL nucleic acids is given in FIG. 30 A. FIG. 31 B shows an alignment of representative SPL11 nucleic acids (in DNA form), in which the target site of miR156 in the corresponding ribonucleic acids is indicated. An example of a miR156 insensitive SPL11 nucleic acid encoding SEQ ID NO: 428 is represented by SEQ ID NO: 431. Further examples of miR156 insensitive SPL11 nucleic acids are represented by SEQ ID 440 and SEQ ID NO: 454, the latter lacking the miR156 target site.

[0734] Preferably a SPL11 nucleic acid useful in the methods of the invention has 1, 2, 3, 4 or more mismatches in the miR156 target site or lack the target site of the miR156 gene. Examples of such SPL11 nucleic acids are given in FIG. 31 B. Further preferably is a nucleic acid as represented by SEQ ID NO: 431, SEQ ID 440 and SEQ ID NO: 454.

[0735] Nucleic acids encoding SPL11 polypeptides need not be full-length nucleic acids, since performance of the methods of the invention does not rely on the use of full-length nucleic acid sequences. According to the present invention, there is provided a method for enhancing yield-related traits in plants, comprising introducing and expressing in a plant a portion of any one of the nucleic acid sequences given in Table G1 of Example 62, or a portion of a nucleic acid encoding an orthologue, paralogue or homologue of any of the amino acid sequences given in Table G1 of Example 62.

[0736] A portion of a nucleic acid may be prepared, for example, by making one or more deletions to the nucleic acid. The portions may be used in isolated form or they may be fused to other coding (or non-coding) sequences in order to, for example, produce a protein that combines several activities. When fused to other coding sequences, the resultant polypeptide produced upon translation may be bigger than that predicted for the protein portion.

[0737] Portions useful in the methods of the invention, encode a SPL11 polypeptide as defined herein, and have substantially the same biological activity as the amino acid sequences given in Table G1 of Example 62. Preferably, the portion is a portion of any one of the nucleic acids given in Table G1 of Example 62, or is a portion of a nucleic acid encoding an orthologue or paralogue of any one of the amino acid sequences given in Table G1 of Example 62. Preferably the portion is at least 70, 100, 200, 500, 550, 600, 650, 700, 750, 800, 850, 900, 950, 1000, 1500, 2000, 2500, 3000, 3500, 4000, 4500, 5000 consecutive nucleotides in length, the consecutive nucleotides being of any one of the nucleic acid sequences given in Table G1 of Example 62, or of a nucleic acid encoding an orthologue or paralogue of any one of the amino acid sequences given in Table G1 of Example 62. Preferably the portion encodes at least an SBP domain. Most preferably the portion is a portion of the nucleic acid of SEQ ID NO: 427. Preferably, the portion encodes an amino acid sequence which when used in the construction of a phylogenetic tree, such as the one depicted in FIG. 29, clusters with the group of SPL11 polypeptides comprising the amino acid sequence represented by SEQ ID NO: 428 (AtSPL11) rather than with any other group.

[0738] Another nucleic acid variant useful in the methods of the invention is a nucleic acid capable of hybridising, under reduced stringency conditions, preferably under stringent conditions, with a nucleic acid encoding a SPL11 polypeptide as defined herein, or with a portion as defined herein.

[0739] According to the present invention, there is provided a method for enhancing yield-related traits in plants, comprising introducing and expressing in a plant a nucleic acid capable of hybridizing to any one of the nucleic acids given in Table G1 of Example 62, or comprising introducing and expressing in a plant a nucleic acid capable of hybridising to a nucleic acid encoding an orthologue, paralogue or homologue of any of the nucleic acid sequences given in Table G1 of Example 62.

[0740] Hybridising sequences useful in the methods of the invention encode a SPL11 polypeptide as defined herein, and have substantially the same biological activity as the amino acid sequences given in Table G1 of Example 62. Preferably, the hybridising sequence is capable of hybridising to any one of the nucleic acids given in Table G1 of Example 62, or to a portion of any of these sequences, a portion being as defined above, or wherein the hybridising sequence is capable of hybridising to a nucleic acid encoding an orthologue or paralogue of any one of the amino acid sequences given in Table G1 of Example 62. Most preferably, the hybridising sequence is capable of hybridising to a nucleic acid as represented by SEQ ID NO: 427 or to a portion thereof.

[0741] Preferably, the hybridising sequence encodes an amino acid sequence which when used in the construction of a phylogenetic tree, such as the one depicted in FIG. 29, clusters with the group of SPL11 polypeptides comprising the amino acid sequence represented by SEQ ID NO: 428 (AtSPL11) rather than with any other group.

[0742] Another nucleic acid variant useful in the methods of the invention is a splice variant encoding a SPL11 polypeptide as defined hereinabove, a splice variant being as defined herein.

[0743] According to the present invention, there is provided a method for enhancing yield-related traits in plants, comprising introducing and expressing in a plant a splice variant of any one of the nucleic acid sequences given in Table G1 of Example 62, or a splice variant of a nucleic acid encoding an orthologue, paralogue or homologue of any of the amino acid sequences given in Table G1 of Example 62. Examples of spliced variants of the gene encoding SEQ ID NO: 428 are represented by SEQ ID NO: 427; SEQ ID NO: 429 and SEQ ID NO: 430.

[0744] Preferred splice variants are splice variants of a nucleic acid represented by SEQ ID NO: 427, or a splice variant of a nucleic acid encoding an orthologue or paralogue of SEQ ID NO: 428. Preferably, the amino acid sequence encoded by the splice variant, when used in the construction of a phylogenetic tree, such as the one depicted in FIG. 29, clusters with the group of SPL11 polypeptides comprising the amino acid sequence represented by SEQ ID NO: 428 (AtSPL11) rather than with any other group.

[0745] Another nucleic acid variant useful in performing the methods of the invention is an allelic variant of a nucleic acid encoding a SPL11 polypeptide as defined hereinabove, an allelic variant being as defined herein.

[0746] According to the present invention, there is provided a method for enhancing yield-related traits in plants, comprising introducing and expressing in a plant an allelic variant of any one of the nucleic acids given in Table G1 of Example 62, or comprising introducing and expressing in a plant an allelic variant of a nucleic acid encoding an orthologue, paralogue or homologue of any of the amino acid sequences given in Table G1 of Example 62.

[0747] The allelic variants useful in the methods of the present invention have substantially the same biological activity as the SPL11 polypeptide of SEQ ID NO: 428 and any of the amino acids depicted in Table G1 of Example 62. Allelic variants exist in nature, and encompassed within the methods of the present invention is the use of these natural alleles. Preferably, the allelic variant is an allelic variant of SEQ ID NO: 427 or an allelic variant of a nucleic acid encoding an orthologue or paralogue of SEQ ID NO: 428. Preferably, the amino acid sequence encoded by the allelic variant, when used in the construction of a phylogenetic tree, such as the one depicted in FIG. 29, clusters with the SPL11 polypeptides comprising the amino acid sequence represented by SEQ ID NO: 428 (AtSPL11) rather than with any other group.

[0748] Gene shuffling or directed evolution may also be used to generate variants of nucleic acids encoding SPL11 polypeptides as defined above; the term “gene shuffling” being as defined herein.

[0749] According to the present invention, there is provided a method for enhancing yield-related traits in plants, comprising introducing and expressing in a plant a variant of any one of the nucleic acid sequences given in Table G1 of Example 62, or comprising introducing and expressing in a plant a variant of a nucleic acid encoding an orthologue, paralogue or homologue of any of the amino acid sequences given in Table G1 of Example 62, which variant nucleic acid is obtained by gene shuffling.

[0750] Preferably, the amino acid sequence encoded by the variant nucleic acid obtained by gene shuffling, when used in the construction of a phylogenetic tree such as the one depicted in FIG. 29, clusters with the group of SPL11 polypeptides comprising the amino acid sequence represented by SEQ ID NO: 428 (AtSPL11) rather than with any other group.

[0751] Furthermore, nucleic acid variants may also be obtained by site-directed mutagenesis. Several methods are available to achieve site-directed mutagenesis, the most common being PCR based methods (Current Protocols in Molecular Biology. Wiley Eds.).

[0752] Nucleic acids encoding SPL11 polypeptides may be derived from any natural or artificial source. The nucleic acid may be modified from its native form in composition and/or genomic environment through deliberate human manipulation. Preferably the SPL11 polypeptide-encoding nucleic acid is from a plant, further preferably from a dicotyledonous plant, more preferably from the family Brassicaceae, most preferably the nucleic acid is from Arabidopsis thaliana.

[0753] Performance of the methods of the invention gives plants having enhanced yield-related traits. In particular performance of the methods of the invention gives plants having increased yield, especially increased seed yield relative to control plants. The terms “yield” and “seed yield” are described in more detail in the “definitions” section herein.

[0754] Reference herein to enhanced yield-related traits is taken to mean an increase in biomass (weight) of one or more parts of a plant, which may include aboveground (harvestable) parts and/or (harvestable) parts below ground. In particular, such harvestable parts are seeds, and performance of the methods of the invention results in plants having increased yield relative to the yield of control plants.

[0755] Taking corn as an example, a yield increase may be manifested as one or more of the following: increase in the number of plants established per hectare or acre, an increase in the number of ears per plant, an increase in the number of rows, number of kernels per row, kernel weight, thousand kernel weight, ear length/diameter, increase in the seed filling rate (which is the number of filled seeds divided by the total number of seeds and multiplied by 100), among others. Taking rice as an example, a yield increase may manifest itself as an increase in one or more of the following: number of plants per hectare or acre, number of panicles per plant, number of spikelets per panicle, number of flowers (florets) per panicle (which is expressed as a ratio of the number of filled seeds over the number of primary panicles), increase in the seed filling rate (which is the number of filled seeds divided by the total number of seeds and multiplied by 100), increase in thousand kernel weight, among others.

[0756] The present invention provides a method for increasing yield, especially seed yield of plants, relative to control plants, which method comprises modulating expression, preferably increasing expression, in a plant of a nucleic acid encoding a SPL11 polypeptide as defined herein.

[0757] Since the transgenic plants according to the present invention have increased yield, it is likely that these plants exhibit an increased growth rate (during at least part of their life cycle), relative to the growth rate of control plants at a corresponding stage in their life cycle.

[0758] The increased growth rate may be specific to one or more parts of a plant (including seeds), or may be throughout substantially the whole plant. Plants having an increased growth rate may have a shorter life cycle. The life cycle of a plant may be taken to mean the time needed to grow from a dry mature seed up to the stage where the plant has produced dry mature seeds, similar to the starting material. This life cycle may be influenced by factors such as early vigour, growth rate, greenness index, flowering time and speed of seed maturation. The increase in growth rate may take place at one or more stages in the life cycle of a plant or during substantially the whole plant life cycle. Increased growth rate during the early stages in the life cycle of a plant may reflect enhanced vigour. The increase in growth rate may alter the harvest cycle of a plant allowing plants to be sown later and/or harvested sooner than would otherwise be possible (a similar effect may be obtained with earlier flowering time). If the growth rate is sufficiently increased, it may allow for the further sowing of seeds of the same plant species (for example sowing and harvesting of rice plants followed by sowing and harvesting of further rice plants all within one conventional growing period). Similarly, if the growth rate is sufficiently increased, it may allow for the further sowing of seeds of different plants species (for example the sowing and harvesting of corn plants followed by, for example, the sowing and optional harvesting of soybean, potato or any other suitable plant). Harvesting additional times from the same rootstock in the case of some crop plants may also be possible. Altering the harvest cycle of a plant may lead to an increase in annual biomass production per acre (due to an increase in the number of times (say in a year) that any particular plant may be grown and harvested). An increase in growth rate may also allow for the cultivation of transgenic plants in a wider geographical area than their wild-type counterparts, since the territorial limitations for growing a crop are often determined by adverse environmental conditions either at the time of planting (early season) or at the time of harvesting (late season). Such adverse conditions may be avoided if the harvest cycle is shortened. The growth rate may be determined by deriving various parameters from growth curves, such parameters may be: T-Mid (the time taken for plants to reach 50% of their maximal size) and T-90 (time taken for plants to reach 90% of their maximal size), amongst others.

[0759] According to a preferred feature of the present invention, performance of the methods of the invention gives plants having an increased growth rate relative to control plants. Therefore, according to the present invention, there is provided a method for increasing the growth rate of plants, which method comprises modulating expression, preferably increasing expression, in a plant of a nucleic acid encoding a SPL11 polypeptide as defined herein.

[0760] An increase in yield and/or growth rate occurs whether the plant is under non-stress conditions or whether the plant is exposed to various stresses compared to control plants. Plants typically respond to exposure to stress by growing more slowly. In conditions of severe stress, the plant may even stop growing altogether. Mild stress on the other hand is defined herein as being any stress to which a plant is exposed which does not result in the plant ceasing to grow altogether without the capacity to resume growth. Mild stress in the sense of the invention leads to a reduction in the growth of the stressed plants of less than 40%, 35% or 30%, preferably less than 25%, 20% or 15%, more preferably less than 14%, 13%, 12%, 11% or 10% or less in comparison to the control plant under non-stress conditions. Due to advances in agricultural practices (irrigation, fertilization, pesticide treatments) severe stresses are not often encountered in cultivated crop plants. As a consequence, the compromised growth induced by mild stress is often an undesirable feature for agriculture. Mild stresses are the everyday biotic and/or abiotic (environmental) stresses to which a plant is exposed. Abiotic stresses may be due to drought or excess water, anaerobic stress, salt stress, chemical toxicity, oxidative stress and hot, cold or freezing temperatures. The abiotic stress may be an osmotic stress caused by a water stress (particularly due to drought), salt stress, oxidative stress or an ionic stress. Biotic stresses are typically those stresses caused by pathogens, such as bacteria, viruses, fungi and insects.

[0761] In particular, the methods of the present invention may be performed under non-stress conditions or under conditions of mild drought to give plants having increased yield relative to control plants. As reported in Wang et al. (Planta (2003) 218: 1-14), abiotic stress leads to a series of morphological, physiological, biochemical and molecular changes that adversely affect plant growth and productivity. Drought, salinity, extreme temperatures and oxidative stress are known to be interconnected and may induce growth and cellular damage through similar mechanisms. Rabbani et al. (Plant Physiol (2003) 133: 1755-1767) describes a particularly high degree of “cross talk” between drought stress and high-salinity stress. For example, drought and/or salinisation are manifested primarily as osmotic stress, resulting in the disruption of homeostasis and ion distribution in the cell. Oxidative stress, which frequently accompanies high or low temperature, salinity or drought stress, may cause denaturing of functional and structural proteins. As a consequence, these diverse environmental stresses often activate similar cell signalling pathways and cellular responses, such as the production of stress proteins, up-regulation of anti-oxidants, accumulation of compatible solutes and growth arrest. The term “non-stress” conditions as used herein are those environmental conditions that allow optimal growth of plants. Persons skilled in the art are aware of normal soil conditions and climatic conditions for a given location. Plants with optimal growth conditions, (grown under non-stress conditions) typically yield in increasing order of preference at least 90%, 87%, 85%, 83%, 80%, 77% or 75% of the average production of such plant in a given environment. Average production may be calculated on harvest and/or season basis. Persons skilled in the art are aware of average yield productions of a crop.

[0762] Performance of the methods of the invention gives plants grown under non-stress conditions or under mild drought conditions increased yield relative to control plants grown under comparable conditions. Therefore, according to the present invention, there is provided a method for increasing yield in plants grown under non-stress conditions or under mild drought conditions, which method comprises increasing expression in a plant of a nucleic acid encoding a SPL11 polypeptide.

[0763] Performance of the methods of the invention gives plants grown under conditions of nutrient deficiency, particularly under conditions of nitrogen deficiency, increased yield relative to control plants grown under comparable conditions. Therefore, according to the present invention, there is provided a method for increasing yield in plants grown under conditions of nutrient deficiency, which method comprises increasing expression in a plant of a nucleic acid encoding a SPL11 polypeptide. Nutrient deficiency may result from a lack or excess of nutrients such as nitrogen, phosphates and other phosphorous-containing compounds, potassium, calcium, cadmium, magnesium, manganese, iron and boron, amongst others.

[0764] The present invention encompasses plants or parts thereof (including seeds) obtainable by the methods according to the present invention. The plants or parts thereof comprise a nucleic acid transgene encoding a SPL11 polypeptide as defined above.

[0765] The invention also provides genetic constructs and vectors to facilitate introduction and/or expression in plants of nucleic acids encoding SPL11 polypeptides. The gene constructs may be inserted into vectors, which may be commercially available, suitable for transforming into plants and suitable for expression of the gene of interest in the transformed cells. The invention also provides use of a gene construct as defined herein in the methods of the invention.

[0766] More specifically, the present invention provides a construct comprising:
[0767] (a) a nucleic acid encoding a SPL11 polypeptide as defined above;
[0768] (b) one or more control sequences capable of driving expression of the nucleic acid sequence of (a); and optionally
[0769] (c) a transcription termination sequence.

[0770] Preferably, the nucleic acid encoding a SPL11 polypeptide is as defined above. The term “control sequence” and “termination sequence” are as defined herein.

[0771] Plants are transformed with a vector comprising any of the nucleic acids described above. The skilled artisan is well aware of the genetic elements that must be present on the vector in order to successfully transform, select and propagate host cells containing the sequence of interest. The sequence of interest is operably linked to one or more control sequences (at least to a promoter).

[0772] Advantageously, any type of promoter, whether natural or synthetic, may be used to drive expression of the nucleic acid sequence. A constitutive promoter is particularly useful in the methods. See the “Definitions” section herein for definitions of the various promoter types.

[0773] It should be clear that the applicability of the present invention is not restricted to the SPL11 polypeptide-encoding nucleic acid represented by SEQ ID NO: 427, nor is the applicability of the invention restricted to expression of a SPL11 polypeptide-encoding nucleic acid when driven by a constitutive promoter.

[0774] The constitutive promoter is preferably a GOS2 promoter, preferably a GOS2 promoter from rice. Further preferably the constitutive promoter is represented by a nucleic acid sequence substantially similar to SEQ ID NO: 476, most preferably the constitutive promoter is as represented by SEQ ID NO: 476. See the “Definitions” section herein for further examples of constitutive promoters.

[0775] In an alternative embodiment, a seed specific promoter is used. The seed specific promoter is preferably ABA (abcisic acid) inducible, it is preferably the WSI18 promoter, preferably the WSI18 from rice. Further preferably the constitutive promoter is represented by a nucleic acid sequence substantially similar to SEQ ID NO: 477. See the “Definitions” section herein for further examples of seed specific promoters.

[0776] It should be clear that the promoters useful in the methods of the invention are not limited to those specified in the abovementioned embodiments.

[0777] Optionally, one or more terminator sequences may be used in the construct introduced into a plant. Additional regulatory elements may include transcriptional as well as translational enhancers. Those skilled in the art will be aware of terminator and enhancer sequences that may be suitable for use in performing the invention. An intron sequence may also be added to the 5′ untranslated region (UTR) or in the coding sequence to increase the amount of the mature message that accumulates in the cytosol, as described in the definitions section. Other control sequences (besides promoter, enhancer, silencer, intron sequences, 3′UTR and/or 5′UTR regions) may be protein and/or RNA stabilizing elements. Such sequences would be known or may readily be obtained by a person skilled in the art.

[0778] The genetic constructs of the invention may further include an origin of replication sequence that is required for maintenance and/or replication in a specific cell type. One example is when a genetic construct is required to be maintained in a bacterial cell as an episomal genetic element (e.g. plasmid or cosmid molecule). Preferred origins of replication include, but are not limited to, the f1-ori and colE1.

[0779] For the detection of the successful transfer of the nucleic acid sequences as used in the methods of the invention and/or selection of transgenic plants comprising these nucleic acids, it is advantageous to use marker genes (or reporter genes). Therefore, the genetic construct may optionally comprise a selectable marker gene. Selectable markers are described in more detail in the “definitions” section herein.

[0780] It is known that upon stable or transient integration of nucleic acids into plant cells, only a minority of the cells takes up the foreign DNA and, if desired, integrates it into its genome, depending on the expression vector used and the transfection technique used. To identify and select these integrants, a gene coding for a selectable marker (such as the ones described above) is usually introduced into the host cells together with the gene of interest. These markers can for example be used in mutants in which these genes are not functional by, for example, deletion by conventional methods. Furthermore, nucleic acid molecules encoding a selectable marker can be introduced into a host cell on the same vector that comprises the sequence encoding the polypeptides of the invention or used in the methods of the invention, or else in a separate vector. Cells which have been stably transfected with the introduced nucleic acid can be identified for example by selection (for example, cells which have integrated the selectable marker survive whereas the other cells die). The marker genes may be removed or excised from the transgenic cell once they are no longer needed. Techniques for marker gene removal are known in the art, useful techniques are described above in the definitions section.

[0781] The invention also provides a method for the production of transgenic plants having enhanced yield-related traits relative to control plants, comprising introduction and expression in a plant of any nucleic acid encoding a SPL11 polypeptide as defined hereinabove.

[0782] More specifically, the present invention provides a method for the production of transgenic plants having increased enhanced yield-related traits, particularly increased (seed) yield, which method comprises:
[0783] (i) introducing and expressing in a plant or plant cell a SPL11 polypeptide-encoding nucleic acid; and
[0784] (ii) cultivating the plant cell under conditions promoting plant growth and development.

[0785] The nucleic acid of (i) may be any of the nucleic acids capable of encoding a SPL11 polypeptide as defined herein.

[0786] The nucleic acid may be introduced directly into a plant cell or into the plant itself (including introduction into a tissue, organ or any other part of a plant). According to a preferred feature of the present invention, the nucleic acid is preferably introduced into a plant by transformation. The term “transformation” is described in more detail in the “definitions” section herein.

[0787] The genetically modified plant cells can be regenerated via all methods with which the skilled worker is familiar. Suitable methods can be found in the abovementioned publications by S. D. Kung and R. Wu, Potrykus or Hofgen and Willmitzer.

[0788] Generally after transformation, plant cells or cell groupings are selected for the presence of one or more markers which are encoded by plant-expressible genes co-transferred with the gene of interest, following which the transformed material is regenerated into a whole plant. To select transformed plants, the plant material obtained in the transformation is, as a rule, subjected to selective conditions so that transformed plants can be distinguished from untransformed plants. For example, the seeds obtained in the above-described manner can be planted and, after an initial growing period, subjected to a suitable selection by spraying. A further possibility consists in growing the seeds, if appropriate after sterilization, on agar plates using a suitable selection agent so that only the transformed seeds can grow into plants. Alternatively, the transformed plants are screened for the presence of a selectable marker such as the ones described above.

[0789] Following DNA transfer and regeneration, putatively transformed plants may also be evaluated, for instance using Southern analysis, for the presence of the gene of interest, copy number and/or genomic organisation. Alternatively or additionally, expression levels of the newly introduced DNA may be monitored using Northern and/or Western analysis, both techniques being well known to persons having ordinary skill in the art.

[0790] The generated transformed plants may be propagated by a variety of means, such as by clonal propagation or classical breeding techniques. For example, a first generation (or T1) transformed plant may be selfed and homozygous second-generation (or T2) transformants selected, and the T2 plants may then further be propagated through classical breeding techniques. The generated transformed organisms may take a variety of forms. For example, they may be chimeras of transformed cells and non-transformed cells; clonal transformants (e.g., all cells transformed to contain the expression cassette); grafts of transformed and untransformed tissues (e.g., in plants, a transformed rootstock grafted to an untransformed scion).

[0791] The present invention clearly extends to any plant cell or plant produced by any of the methods described herein, and to all plant parts and propagules thereof. The present invention extends further to encompass the progeny of a primary transformed or transfected cell, tissue, organ or whole plant that has been produced by any of the aforementioned methods, the only requirement being that progeny exhibit the same genotypic and/or phenotypic characteristic(s) as those produced by the parent in the methods according to the invention.

[0792] The invention also includes host cells containing an isolated nucleic acid encoding a SPL11 polypeptide as defined hereinabove. Preferred host cells according to the invention are plant cells. Host plants for the nucleic acids or the vector used in the method according to the invention, the expression cassette or construct or vector are, in principle, advantageously all plants, which are capable of synthesizing the polypeptides used in the inventive method.

[0793] The methods of the invention are advantageously applicable to any plant. Plants that are particularly useful in the methods of the invention include all plants which belong to the superfamily Viridiplantae, in particular monocotyledonous and dicotyledonous plants including fodder or forage legumes, ornamental plants, food crops, trees or shrubs. According to a preferred embodiment of the present invention, the plant is a crop plant. Examples of crop plants include soybean, sunflower, canola, alfalfa, rapeseed, cotton, tomato, potato and tobacco. Further preferably, the plant is a monocotyledonous plant. Examples of monocotyledonous plants include sugarcane. More preferably the plant is a cereal. Examples of cereals include rice, maize, wheat, barley, millet, rye, triticale, sorghum and oats.

[0794] The invention also extends to harvestable parts of a plant such as, but not limited to seeds, leaves, fruits, flowers, stems, roots, rhizomes, tubers and bulbs. The invention furthermore relates to products derived, preferably directly derived, from a harvestable part of such a plant, such as dry pellets or powders, oil, fat and fatty acids, starch or proteins.

[0795] According to a preferred feature of the invention, the modulated expression is increased expression. Methods for increasing expression of nucleic acids or genes, or gene products, are well documented in the art and examples are provided in the definitions section.

[0796] As mentioned above, a preferred method for modulating (preferably, increasing) expression of a nucleic acid encoding a SPL11 polypeptide is by introducing and expressing in a plant a nucleic acid encoding a SPL11 polypeptide; however the effects of performing the method, i.e. enhancing yield-related traits may also be achieved using other well known techniques, including but not limited to T-DNA activation tagging, TILLING, homologous recombination. A description of these techniques is provided in the definitions section.

[0797] The present invention also encompasses use of nucleic acids encoding SPL11 polypeptides as described herein and use of these SPL11 polypeptides in enhancing any of the aforementioned yield-related traits in plants.

[0798] Nucleic acids encoding SPL11 polypeptides described herein, or the SPL11 polypeptides themselves, may find use in breeding programmes in which a DNA marker is identified, which may be genetically linked to a SPL11 polypeptide-encoding gene. The nucleic acids/genes, or the SPL11 polypeptides themselves may be used to define a molecular marker. This DNA or protein marker may then be used in breeding programmes to select plants having enhanced yield-related traits as defined hereinabove in the methods of the invention.

[0799] Allelic variants of a SPL11 polypeptide-encoding nucleic acid/gene may also find use in marker-assisted breeding programmes. Such breeding programmes sometimes require introduction of allelic variation by mutagenic treatment of the plants, using for example EMS mutagenesis; alternatively, the programme may start with a collection of allelic variants of so called “natural” origin caused unintentionally. Identification of allelic variants then takes place, for example, by PCR. This is followed by a step for selection of superior allelic variants of the sequence in question and which give increased yield. Selection is typically carried out by monitoring growth performance of plants containing different allelic variants of the sequence in question. Growth performance may be monitored in a greenhouse or in the field. Further optional steps include crossing plants in which the superior allelic variant was identified with another plant. This could be used, for example, to make a combination of interesting phenotypic features.

[0800] Nucleic acids encoding SPL11 polypeptides may also be used as probes for genetically and physically mapping the genes that they are a part of, and as markers for traits linked to those genes. Such information may be useful in plant breeding in order to develop lines with desired phenotypes. Such use of SPL11 polypeptide-encoding nucleic acids requires only a nucleic acid sequence of at least 15 nucleotides in length. The SPL11 polypeptide-encoding nucleic acids may be used as restriction fragment length polymorphism (RFLP) markers. Southern blots (Sambrook J, Fritsch E F and Maniatis T (1989) Molecular Cloning, A Laboratory Manual) of restriction-digested plant genomic DNA may be probed with the SPL11-encoding nucleic acids. The resulting banding patterns may then be subjected to genetic analyses using computer programs such as MapMaker (Lander et al. (1987) Genomics 1: 174-181) in order to construct a genetic map. In addition, the nucleic acids may be used to probe Southern blots containing restriction endonuclease-treated genomic DNAs of a set of individuals representing parent and progeny of a defined genetic cross. Segregation of the DNA polymorphisms is noted and used to calculate the position of the SPL11 polypeptide-encoding nucleic acid in the genetic map previously obtained using this population (Botstein et al. (1980) Am. J. Hum. Genet. 32:314-331).

[0801] The production and use of plant gene-derived probes for use in genetic mapping is described in Bernatzky and Tanksley (1986) Plant Mol. Biol. Reporter 4: 37-41. Numerous publications describe genetic mapping of specific cDNA clones using the methodology outlined above or variations thereof. For example, F2 intercross populations, backcross populations, randomly mated populations, near isogenic lines, and other sets of individuals may be used for mapping. Such methodologies are well known to those skilled in the art.

[0802] The nucleic acid probes may also be used for physical mapping (i.e., placement of sequences on physical maps; see Hoheisel et al. In: Non-mammalian Genomic Analysis: A Practical Guide, Academic press 1996, pp. 319-346, and references cited therein).

[0803] In another embodiment, the nucleic acid probes may be used in direct fluorescence in situ hybridisation (FISH) mapping (Trask (1991) Trends Genet. 7:149-154). Although current methods of FISH mapping favour use of large clones (several kb to several hundred kb; see Laan et al. (1995) Genome Res. 5:13-20), improvements in sensitivity may allow performance of FISH mapping using shorter probes.

[0804] A variety of nucleic acid amplification-based methods for genetic and physical mapping may be carried out using the nucleic acids. Examples include allele-specific amplification (Kazazian (1989) J. Lab. Clin. Med 11:95-96), polymorphism of PCR-amplified fragments (CAPS; Sheffield et al. (1993) Genomics 16:325-332), allele-specific ligation (Landegren et al. (1988) Science 241:1077-1080), nucleotide extension reactions (Sokolov (1990) Nucleic Acid Res. 18:3671), Radiation Hybrid Mapping (Walter et al. (1997) Nat. Genet. 7:22-28) and Happy Mapping (Dear and Cook (1989) Nucleic Acid Res. 17:6795-6807). For these methods, the sequence of a nucleic acid is used to design and produce primer pairs for use in the amplification reaction or in primer extension reactions. The design of such primers is well known to those skilled in the art. In methods employing PCR-based genetic mapping, it may be necessary to identify DNA sequence differences between the parents of the mapping cross in the region corresponding to the instant nucleic acid sequence. This, however, is generally not necessary for mapping methods.

[0805] The methods according to the present invention result in plants having enhanced yield-related traits, as described hereinbefore. These traits may also be combined with other economically advantageous traits, such as further yield-enhancing traits, tolerance to other abiotic and biotic stresses, traits modifying various architectural features and/or biochemical and/or physiological features.

[0806] The present invention will now be described in reference to the following items:
[0807] 1. A method for enhancing yield-related traits in plants relative to control plants, comprising modulating expression in a plant of a nucleic acid encoding an LBD polypeptide, wherein said LBD polypeptide comprises a DUF260 domain.
[0808] 2. Method according to item 1, wherein said LBD polypeptide comprises one or more of the following motifs:

(i) Motif 1:
(SEQ ID NO: 5)
MSCNGCRXLRKGCX,
(ii) Motif 2:
(SEQ ID NO: 6)
QXXATXFXAKFXGR,
(iii) Motif 3:
(SEQ ID NO: 7)
FXSLLXEAXG

[0809] 3. Method according to item 1 or 2, wherein said modulated expression is effected by introducing and expressing in a plant a nucleic acid encoding a LBD polypeptide.
[0810] 4. Method according to any preceding item, wherein said nucleic acid encoding a LBD polypeptide encodes any one of the proteins listed in Table A1 or is a portion of such a nucleic acid, or a nucleic acid capable of hybridising with such a nucleic acid.
[0811] 5. Method according to any preceding item, wherein said nucleic acid sequence encodes an orthologue or paralogue of any of the proteins given in Table A1.
[0812] 6. Method according to any preceding item, wherein said enhanced yield-related traits comprise increased yield, preferably increased biomass and/or increased seed yield relative to control plants.
[0813] 7. Method according to any one of items 1 to 6, wherein said enhanced yield-related traits are obtained under non-stress conditions.
[0814] 8. Method according to any one of items 1 to 6, wherein said enhanced yield-related traits are obtained under conditions of nitrogen deficiency.
[0815] 9. Method according to any one of items 3 to 8, wherein said nucleic acid is operably linked to a constitutive promoter, preferably to a GOS2 promoter, most preferably to a GOS2 promoter from rice.
[0816] 10. Method according to any preceding item, wherein said nucleic acid encoding a LBD polypeptide is of plant origin, preferably from a dicotyledonous plant, further preferably from the family Brassicaceae, more preferably from the genus Arabidopsis, most preferably from Arabidopsis thaliana.
[0817] 11. An isolated nucleic acid molecule comprising any one of the following features:
   [0818] (i) a nucleic acid represented by SEQ ID NO: 69;
   [0819] (ii) a nucleic acid or fragment thereof that is complementary to any one of the SEQ ID NOs given in (i);
   [0820] (iii) a nucleic acid encoding a LBD polypeptide having, in increasing order of preference, at least 60%, 65%, 70%, 75%, 80%, 85%, 90%, 95%, 96%, 97%, 98%, 99% or more sequence identity to SEQ ID NO: 70;
   [0821] (iv) a nucleic acid capable of hybridizing under stringent conditions to any one of the nucleic acids given in (i), (ii) or (iii) above.
[0822] 12. An isolated polypeptide comprising:
   [0823] (i) an amino acid sequence having, in increasing order of preference, at least 60%, 65%, 70%, 75%, 80%, 85%, 90%, 95%, 96%, 97%, 98%, 99% or 100% sequence identity to the amino acid sequence given in SEQ ID NO: 70.
   [0824] (ii) derivatives of any of the amino acid sequences given in (i).
[0825] 13. Plant or part thereof, including seeds, obtainable by a method according to any preceding item, wherein said plant or part thereof comprises a recombinant nucleic acid encoding an LBD polypeptide.
[0826] 14. Construct comprising:
   [0827] (i) nucleic acid encoding an LBD polypeptide as defined in items 1, 2 or 12;
   [0828] (ii) one or more control sequences capable of driving expression of the nucleic acid sequence of (a); and optionally
   [0829] (iii) a transcription termination sequence.
[0830] 15. Construct according to item 14, wherein one of said control sequences is a constitutive promoter, preferably a GOS2 promoter, most preferably a GOS2 promoter from rice.
[0831] 16. Use of a construct according to item 14 or 15 in a method for making plants having increased yield, particularly increased biomass and/or increased seed yield relative to control plants.
[0832] 17. Plant, plant part or plant cell transformed with a construct according to item 14 or 15.
[0833] 18. Method for the production of a transgenic plant having increased yield, particularly increased biomass and/or increased seed yield relative to control plants, comprising:
   [0834] (i) introducing and expressing in a plant a nucleic acid encoding an LBD polypeptide as defined in item 1, 2 or 12; and
   [0835] (ii) cultivating the plant cell under conditions promoting plant growth and development.
[0836] 19. Transgenic plant having increased yield, particularly increased biomass and/or increased seed yield, relative to control plants, resulting from increased expression of a nucleic acid encoding an LBD polypeptide as defined in item 1, 2 or 12, or a transgenic plant cell derived from said transgenic plant.
[0837] 20. Transgenic plant according to item 13, 17 or 19, or a transgenic plant cell derived thereof, wherein said plant is a crop plant or a monocot or a cereal, such as rice, maize, wheat, barley, millet, rye, triticale, sorghum and oats.
[0838] 21. Harvestable parts of a plant according to item 19, wherein said harvestable parts are preferably shoot biomass and/or seeds.
[0839] 22. Products derived from a plant according to item 19 and/or from harvestable parts of a plant according to item 20.
[0840] 23. Use of a nucleic acid encoding an LBD polypeptide in increasing yield, particularly in increasing seed yield and/or shoot biomass in plants, relative to control plants.
[0841] 24. A method for enhancing yield-related traits in plants relative to control plants, comprising modulating expression in a plant of a nucleic acid encoding a JMJC polypeptide, wherein said JMJC polypeptide comprises a JmjC domain.
[0842] 25. Method according to item 24 wherein said JmjC domain is represented by a sequence having in increasing order of preference at least 50%, 55%, 60%, 65%, 70%, 75%, 80%, 85%, 90%, 95%, or more sequence identity to:
   [0843] (i) SEQ ID NO: 78; and/or
   [0844] (ii) one of the JmjC domains comprised in the JMJC polypeptides represented by SEQ ID NO: 84; SEQ ID NO: 86; SEQ ID NO: 96; SEQ ID NO: 98; SEQ ID NO: 104; SEQ ID NO: 108; SEQ ID NO: 110; SEQ ID NO: 112; SEQ ID NO: 114; SEQ ID NO: 116; SEQ ID NO: 118; SEQ ID NO: 120; SEQ ID NO: 122; SEQ ID NO: 124; SEQ ID NO: 128; SEQ ID NO: 130; SEQ ID NO: 132; and SEQ ID NO: 134, whose amino acid coordinates are given in Table B4
[0845] 26. Method according to item 24 and item 25, wherein said JMJC polypeptide comprising a motif having in increasing order of preference at least 50%, 55%, 60%, 65%, 70%, 75%, 80%, 85%, 90%, 95% or more sequence identity to any of:
   [0846] (i) SEQ ID NO: 79,
   [0847] (ii) SEQ ID NO: 80,
   [0848] (iii) SEQ ID NO: 81,
   [0849] (iv) SEQ ID NO: 82;
[0850] 27. Method according to item 24 or 26, wherein said modulated expression is effected by introducing and expressing in a plant a nucleic acid encoding a JMJC polypeptide.
[0851] 28. Method according to any one of items 24 to 27, wherein said modulating expression is an increase in the expression.
[0852] 29. Method according to any one of items 24 to 28, wherein said nucleic acid encoding a JMJC polypeptide encodes any one of the proteins listed in Table B1 or is a portion of such a nucleic acid, or a nucleic acid capable of hybridising with such a nucleic acid.
[0853] 30. Method according to one of items 24 to 29, wherein said nucleic acid sequence encodes an orthologue or paralogue of any of the proteins given in Table B1.
[0854] 31. Method according to item 30, wherein said nucleic acid encodes SEQ ID NO: 74.
[0855] 32. Method according to any one of items 24 to 31, wherein said enhanced yield-related traits comprise increased yield, preferably increased harvest index and/or seed yield relative to control plants.
[0856] 33. Method according to any one of items 24 to 32, wherein said enhanced yield-related traits comprise plant early vigour relative to control plants.
[0857] 34. Method according to any one of items 24 to 33, wherein said enhanced yield-related traits are obtained under non-stress conditions.
[0858] 35. Method according to any one of items 24 to 33, wherein said enhanced yield-related traits are obtained under mild drought stress growth conditions.
[0859] 36. Method according to any one of items 24 to 33, wherein said enhanced yield-related traits are obtained under growth conditions of nitrogen deficiency.
[0860] 37. Method according to any one of items 27 to 36, wherein said nucleic acid is operably linked to a constitutive promoter, preferably to a GOS2 promoter, most preferably to a GOS2 promoter from rice.
[0861] 38. Method according to any one of items 24 to 37, wherein said nucleic acid encoding a JMJC polypeptide is of plant origin, preferably from a dicotyledonous plant, further preferably from the family Brassicaceae, more preferably from the genus Arabidopsis, most preferably from Arabidopsis thaliana.
[0862] 39. Plant or part thereof, including seeds, obtainable by a method according to any one of items 24 to 38, wherein said plant or part thereof comprises a recombinant nucleic acid encoding a JMJC polypeptide.
[0863] 40. Construct comprising:
   [0864] (i) nucleic acid encoding a JMJC polypeptide as defined in items 24 to 26;
   [0865] (ii) one or more control sequences capable of driving expression of the nucleic acid sequence of (i); and optionally
   [0866] (iii) a transcription termination sequence.
[0867] 41. Construct according to item 40, wherein one of said control sequences is a constitutive promoter, preferably a GOS2 promoter, most preferably a GOS2 promoter from rice.
[0868] 42. Use of a construct according to item 40 or 41 in a method for making plants having increased yield related traits, particularly plant early vigour and/or increased seed yield relative to control plants.
[0869] 43. Plant, plant part or plant cell transformed with a construct according to item 40 or 41.
[0870] 44. Method for the production of a transgenic plant having increased yield related traits, particularly plant early vigour and/or increased seed yield relative to control plants, comprising:
   [0871] (i) introducing and expressing in a plant a nucleic acid encoding a JMJC polypeptide as defined in item 24 to 26; and
   [0872] (ii) cultivating the plant cell under conditions promoting plant growth and development.
[0873] 45. Transgenic plant having increased yield, particularly increased plant seedling vigour and/or increased seed yield, relative to control plants, resulting from increased expression of a nucleic acid encoding a JMJC polypeptide as defined in item 24 to 26, or a transgenic plant cell derived from said transgenic plant.
[0874] 46. Transgenic plant according to item 39, 43 or 45, or a transgenic plant cell derived thereof, wherein said plant is a crop plant or a monocot or a cereal, such as rice, maize, wheat, barley, millet, rye, triticale, sorghum and oats.
[0875] 47. Harvestable parts of a plant according to item 46, wherein said harvestable parts are preferably shoot biomass and/or seeds.
[0876] 48. Products derived from a plant according to item 46 and/or from harvestable parts of a plant according to item 47.
[0877] 49. Use of a nucleic acid encoding a JMJC polypeptide in increasing yield, particularly in increasing seed yield and/or shoot biomass in plants, relative to control plants.
[0878] 50. An isolated nucleic acid molecule comprising any one of the following features:
   [0879] (i) a nucleic acid represented by SEQ ID NO: 169;
   [0880] (ii) a nucleic acid or fragment thereof that is complementary to SEQ ID NO: 169;
   [0881] (iii) a nucleic acid encoding an JMJC polypeptide having, in increasing order of preference, at least 70%, 75%, 80%, 85%, 90%, 95%, 96%, 97%, 98%, 99% or more sequence identity to the amino acid sequence given in SEQ ID NO: 170;
   [0882] (iv) a nucleic acid capable of hybridizing under stringent conditions to any one of the nucleic acids given in (i), (ii) or (iii) above.
[0883] 51. An isolated polypeptide molecule comprising:
   [0884] (i) an amino acid sequence having, in increasing order of preference, at least 70%, 75%, 80%, 85%, 90%, 95%, 96%, 97%, 98%, 99% or 100% or more sequence identity to the amino acid sequence given in SEQ ID NO: 170;
   [0885] (ii) derivatives of any of the amino acid sequences given in (i).
[0886] 52. A method for enhancing yield-related traits in plants relative to control plants, comprising modulating expression in a plant of a nucleic acid encoding a Casein kinase I (CKI) wherein said CKI is selected from SEQ ID NO: 174 or an orthologue or paralogue thereof.
[0887] 53. Method according to item 52, wherein said modulated expression is effected by introducing and expressing in a plant a nucleic acid encoding said CKI polypeptide.
[0888] 54. Method according to item 52 or 53, wherein said nucleic acid encoding said CKI polypeptide is a portion of SEQ ID NO: 173, or a nucleic acid capable of hybridising with such a nucleic acid.
[0889] 55. Method according to any one of items 52 to 54, wherein said nucleic acid sequence encodes SEQ ID NO: 174.
[0890] 56. Method according to any one of items 52 to 55, wherein said enhanced yield-related traits comprise increased early vigour and/or increased yield, preferably increased biomass and/or increased seed yield relative to control plants.
[0891] 57. Method according to any one of items 52 to 56, wherein said enhanced yield-related traits are obtained under non-stress conditions.
[0892] 58. Method according to any one of items 52 to 56, wherein said enhanced yield-related traits are obtained under abiotic stress conditions.
[0893] 59. Method according to item 58, wherein said abiotic stress conditions are selected from one or more of: conditions of drought stress, conditions of salt stress, and conditions of nitrogen deficiency.
[0894] 60. Method according to any one of items 53 to 59, wherein said nucleic acid is operably linked to a seed-specific promoter.
[0895] 61. Method according to any one of items 53 to 60, wherein said seed-specific promoter is a WSI18 promoter, preferably to a WSI18 promoter from rice.
[0896] 62. Method according to any one of items 52 to 61, wherein said nucleic acid encoding a CKI polypeptide is of plant origin.
[0897] 63. Method according to any one of items 52 to 62, wherein said plant origin is from preferably a dicotyledonous plant, further preferably from the family Solanaceae, more preferably from the genus Nicotiana tabacum.
[0898] 64. Plant or part thereof, including seeds, obtainable by a method according to any one of items 52 to 63, wherein said plant or part thereof comprises a recombinant nucleic acid encoding a CKI polypeptide.
[0899] 65. Construct comprising:
   [0900] (i) nucleic acid encoding a CKI polypeptide as defined in item 52;
   [0901] (ii) one or more control sequences capable of driving expression of the nucleic acid sequence of (a); and optionally
   [0902] (iii) a transcription termination sequence.
[0903] 66. Construct according to item 65, wherein one of said control sequences is a seed specific promoter, preferably a WSI18 promoter.
[0904] 67. Construct according to item 65, wherein one of said seed specific promoter is a WSI18 promoter, most preferably a WSI18 promoter from rice.
[0905] 68. Use of a construct according to any of items 65 to 67 in a method for making plants having increased yield-related traits, particularly increased early vigour, increased biomass and/or increased seed yield relative to control plants.
[0906] 69. Plant, plant part or plant cell transformed with a construct according to any of items 65 to 67.
[0907] 70. Method for the production of a transgenic plant having increased yield, particularly increased biomass and/or increased seed yield relative to control plants, comprising:
   [0908] (i) introducing and expressing in a plant a nucleic acid encoding a CKI polypeptide as defined in item 52; and
   [0909] (ii) cultivating the plant cell under conditions promoting plant growth and development.
[0910] 71. Transgenic plant having increased yield-related traits, particularly increased early vigour, increased biomass and/or increased seed yield, relative to control plants, resulting from increased expression of a nucleic acid encoding a CKI polypeptide as defined in item 52, or a transgenic plant cell derived from said transgenic plant.
[0911] 72. Transgenic plant according to item 64, 69 or 71, or a transgenic plant cell derived thereof, wherein said plant is a crop plant or a monocot or a cereal, such as rice, maize, wheat, barley, millet, rye, triticale, sorghum and oats.
[0912] 73. Harvestable parts of a plant according to item 72, wherein said harvestable parts are preferably shoot biomass and/or seeds.
[0913] 74. Products derived from a plant according to item 72 and/or from harvestable parts of a plant according to item 73.
[0914] 75. Use of a nucleic acid encoding a CKI polypeptide in increasing yield-related traits, particularly in increasing one or more of early vigour, seed yield and shoot biomass in plants, relative to control plants.
[0915] 76. A method for enhancing yield-related traits, preferably enhancing seed-yield related-traits, in plants relative to control plants, comprising modulating, preferably increasing, expression in a plant of a nucleic acid sequence encoding a plant homeodomain finger-homeodomain (PHDf-HD) polypeptide, which PHDf-HD polypeptide comprises: (i) a domain having at least 25%, 30%, 35%, 40%, 45%, 50%, 55%, 60%, 65%, 70%, 75%, 80%, 85%, 90%, 95%, 98%, 99% or more amino acid sequence identity to a leucine zipper/plant homeodomain finger (ZIP/PHDf) domain as represented by SEQ ID NO: 233; and (ii) a domain having at least 25%, 30%, 35%, 40%, 45%, 50%, 55%, 60%, 65%, 70%, 75%, 80%, 85%, 90%, 95%, 98%, 99% or more amino acid sequence identity to a homeodomain (HD) as represented by SEQ ID NO: 234, and optionally selecting for plants having enhanced yield-related traits.
[0916] 77. Method according to item 76, wherein said PHDf-HD polypeptide comprises: (i) a PHD domain as represented by PFAM00628; and (ii) an HD as represented by PFAM00046.
[0917] 78. Method according to item 76 or 77, wherein said PHDf-HD polypeptide, when used in the construction of a HD phylogenetic tree, such as the one depicted in FIG. 13, clusters with the PHDf-HD group of polypeptides comprising the polypeptide sequence as represented by SEQ ID NO: 180, rather than with any other HD group.
[0918] 79. Method according to any one of items 76 to 78, wherein said PHDf-HD polypeptide has in increasing order of preference at least 30%, 35%, 40%, 45%, 50%, 55%, 60%, 65%, 70%, 75%, 80%, 85%, 90%, 95%, 98%, 99% or more sequence identity to the PHDf-HD polypeptide as represented by SEQ ID NO: 180 or to any of the polypeptide sequences given in Table D1 herein.
[0919] 80. Method according to any one of items 76 to 79, wherein said nucleic acid sequence encoding a PHDf-HD polypeptide is represented by any one of the nucleic acid sequence SEQ ID NOs given in Table D1 or a portion thereof, or a sequence capable of hybridising with any one of the nucleic acid sequences SEQ ID NOs given in Table D1.
[0920] 81. Method according to any one of items 76 to 80, wherein said nucleic acid sequence encodes an orthologue or paralogue of any of the SEQ ID NOs given in Table D1.
[0921] 82. Method according to any one of items 76 to 81, wherein said modulated, preferably increased, expression is effected by any one or more of: T-DNA activation tagging, TILLING, or homologous recombination.
[0922] 83. Method according to any one of items 76 to 82, wherein said increased expression is effected by introducing and expressing in a plant a nucleic acid sequence encoding a PHDf-HD polypeptide.
[0923] 84. Method according to any one of items 76 to 83, wherein said yield-related traits are seed yield-related traits, comprising one or more of: (i) increased number of primary panicle; (ii) increased total seed weight per plant; (iii) increased number of (filled) seeds; (iv) increased TKW; or (v) increased harvest index.
[0924] 85. Method according to any one of items 76 to 84, wherein said nucleic acid sequence is operably linked to a constitutive promoter, preferably to a plant constitutive promoter, more preferably to a GOS2 promoter, most preferably to a GOS2 promoter from rice.
[0925] 86. Method according to any one of items 76 to 85, wherein said nucleic acid sequence encoding a PHDf-HD polypeptide is of plant origin, preferably from a monocotyledonous plant, further preferably from the family Poacae more preferably from the genus Oryza, most preferably from Oryza sativa.
[0926] 87. Plants, parts thereof (including seeds), or plant cells obtainable by a method according to any one of items 76 to 86, wherein said plant, part or cell thereof comprises an isolated nucleic acid transgene encoding a PHDf-HD polypeptide operably linked to a plant constitutive promoter.
[0927] 88. Construct comprising:
   [0928] (i) A nucleic acid sequence encoding a PHDf-HD polypeptide as defined in any one of items 76 to 81;
   [0929] (ii) one or more control sequences capable of driving expression of the nucleic acid sequence of (i); and optionally
   [0930] (iii) a transcription termination sequence.
   [0931] wherein at least one of the control sequences is a plant constitutive promoter, preferably a GOS2 promoter.
[0932] 89. Use of a construct according to items 87 in a method for making plants having enhanced yield-related traits relative to control plants, which enhanced yield-related traits, preferably enhanced seed yield-related traits, are one or more of: (i) increased number of primary panicle; (ii) increased total seed weight per plant; (iii) increased number of (filled) seeds; (iv) increased TKW; or (v) increased harvest index.
[0933] 90. Plant, plant part or plant cell transformed with a construct according to item 87 or 88.
[0934] 91. Method for the production of transgenic plants having enhanced yield-related traits relative to control plants, comprising:
   [0935] (i) introducing and expressing in a plant, plant part, or plant cell, a nucleic acid sequence encoding a PHDf-HD polypeptide as defined in any one of items 76 to 81, under the control of plant constitutive promoter; and
   [0936] (ii) cultivating the plant cell under conditions promoting plant growth and development.
[0937] 92. Transgenic plant having enhanced yield-related traits, preferably enhanced seed yield-related traits, relative to control plants, resulting from modulated, preferably increased, expression of a nucleic acid sequence encoding a PHDf-HD polypeptide as defined in any one of items 76 to 81, operably linked to a plant constitutive promoter, or a transgenic plant cell derived from said transgenic plant.
[0938] 93. Transgenic plant according to item 87, 90 or 92, wherein said plant is a crop plant or a monocot or a cereal, such as rice, maize, wheat, barley, millet, rye, triticale, sorghum and oats, or a transgenic plant cell derived from said transgenic plant.
[0939] 94. Harvestable parts comprising a nucleic acid sequence encoding a PHDf-HD polypeptide of a plant according to item 93, wherein said harvestable parts are preferably seeds.
[0940] 95. Products derived from a plant according to item 93 and/or from harvestable parts of a plant according to item 94.
[0941] 96. Use of a nucleic acid sequence encoding a PHDf-HD polypeptide as defined in any one of items 76 to 81 in enhancing yield-related traits in plants, preferably in enhancing seed yield-related traits, comprising one or more of: (i) increased number of primary panicles; (ii) increased total seed weight per plant; (iii) increased number of (filled) seeds; (iv) increased TKW; or (v) increased harvest index.
[0942] 97. An isolated nucleic acid molecule comprising any one of the following features:
   [0943] (i) a nucleic acid represented by SEQ ID NO: 242;
   [0944] (ii) a nucleic acid or fragment thereof that is complementary to SEQ ID NO: 242;
   [0945] (iii) a nucleic acid encoding an JMJC polypeptide having, in increasing order of preference, at least 70%, 75%, 80%, 85%, 90%, 95%, 96%, 97%, 98%, 99% or more sequence identity to the amino acid sequence given in SEQ ID NO: 243;
   [0946] (iv) a nucleic acid capable of hybridizing under stringent conditions to any one of the nucleic acids given in (i), (ii) or (iii) above.
[0947] 98. An isolated polypeptide molecule comprising:
   [0948] (i) an amino acid sequence having, in increasing order of preference, at least 70%, 75%, 80%, 85%, 90%, 95%, 96%, 97%, 98%, 99% or 100% or more sequence identity to the amino acid sequence given in SEQ ID NO: 243;
   [0949] (ii) derivatives of any of the amino acid sequences given in (i).
[0950] 99. A method for enhancing yield-related traits in plants relative to control plants, comprising modulating expression in a plant of a nucleic acid encoding a bHLH11-like polypeptide, wherein said bHLH-11 like polypeptide comprises a Helix-Loop-Helix domain.
[0951] 100. Method according to item 99, wherein said bHLH11-like polypeptide comprises one or more of the following motifs:
   [0952] (i) Motif 1 (SEQ ID NO: 246);
   [0953] (ii) Motif 2 (SEQ ID NO: 247);
   [0954] (iii) Motif 3 (SEQ ID NO: 248);
   [0955] (iv) Motif 4 (SEQ ID NO: 249);
   [0956] (v) Motif 5 (SEQ ID NO: 250);
   [0957] (vi) Motif 6 (SEQ ID NO: 251);
   [0958] (vii) Motif 7 (SEQ ID NO: 252).
[0959] 101. Method according to item 99 or 100, wherein said modulated expression is effected by introducing and expressing in a plant a nucleic acid encoding a bHLH11-like polypeptide.
[0960] 102. Method according to any one of items 99 to 101, wherein said nucleic acid encoding a bHLH11-like polypeptide encodes any one of the proteins listed in Table E1 or is a portion of such a nucleic acid, or a nucleic acid capable of hybridising with such a nucleic acid.
[0961] 103. Method according to any one of items 99 to 102, wherein said nucleic acid sequence encodes an orthologue or paralogue of any of the proteins given in Table E1.
[0962] 104. Method according to any one of items 99 to 103, wherein said enhanced yield-related traits comprise increased yield, preferably increased seed yield relative to control plants.
[0963] 105. Method according to any one of items 99 to 104, wherein said enhanced yield-related traits are obtained under non-stress conditions.
[0964] 106. Method according to any one of items 101 to 105, wherein said nucleic acid is operably linked to a constitutive promoter, preferably to a GOS2 promoter, most preferably to a GOS2 promoter from rice.
[0965] 107. Method according to any one of items 99 to 106, wherein said nucleic acid encoding a bHLH11-like polypeptide is of plant origin, preferably from a monocotyledonous plant, further preferably from the family Poaceae, more preferably from the genus Triticum, most preferably from Triticum aestivum.
[0966] 108. Plant or part thereof, including seeds, obtainable by a method according to any one of items 99 to 107, wherein said plant or part thereof comprises a recombinant nucleic acid encoding a bHLH11-like polypeptide.
[0967] 109. Construct comprising:
   [0968] (i) nucleic acid encoding a bHLH11-like polypeptide as defined in items 99 or 100;
   [0969] (ii) one or more control sequences capable of driving expression of the nucleic acid sequence of (i); and optionally
   [0970] (iii) a transcription termination sequence.
[0971] 110. Construct according to item 109, wherein one of said control sequences is a constitutive promoter, preferably a GOS2 promoter, most preferably a GOS2 promoter from rice.
[0972] 111. Use of a construct according to item 109 or 110 in a method for making plants having increased yield, particularly increased seed yield relative to control plants.
[0973] 112. Plant, plant part or plant cell transformed with a construct according to item 109 or 110.
[0974] 113. Method for the production of a transgenic plant having increased yield, particularly increased seed yield relative to control plants, comprising:
   [0975] (i) introducing and expressing in a plant a nucleic acid encoding a bHLH11-like polypeptide as defined in item 99 or 100; and
   [0976] (ii) cultivating the plant cell under conditions promoting plant growth and development.
[0977] 114. Transgenic plant having increased yield, particularly increased seed yield, relative to control plants, resulting from modulated expression of a nucleic acid encoding a bHLH11-like polypeptide as defined in item 99 or 100, or a transgenic plant cell derived from said transgenic plant.
[0978] 115. Transgenic plant according to item 108, 112 or 114, or a transgenic plant cell derived thereof, wherein said plant is a crop plant or a monocot or a cereal, such as rice, maize, wheat, barley, millet, rye, triticale, sorghum emmer, spelt, secale, einkorn, teff, milo and oats.
[0979] 116. Harvestable parts of a plant according to item 115, wherein said harvestable parts are preferably seeds.
[0980] 117. Products derived from a plant according to item 115 and/or from harvestable parts of a plant according to item 116.
[0981] 118. Use of a nucleic acid encoding a bHLH11-like polypeptide in increasing yield, particularly in increasing seed yield in plants, relative to control plants.
[0982] 119. A method for enhancing yield-related traits in plants relative to control plants, comprising modulating expression in a plant of a nucleic acid encoding an ASR, wherein said ASR is represented by SEQ ID NO: 397 or an orthologue or paralogue thereof.
[0983] 120. Method according to item 119, wherein said modulated expression is effected by introducing and expressing in a plant a nucleic acid encoding said ASR polypeptide.
[0984] 121. Method according to item 119 or 120, wherein said nucleic acid encoding said ASR polypeptide is a portion of SEQ ID NO: 396, or a nucleic acid capable of hybridising with such a nucleic acid.
[0985] 122. Method according to any one of items 119 to 121, wherein said nucleic acid sequence encodes SEQ ID NO: 397, or an orthologue or paralogue thereof.
[0986] 123. Method according to any one of items 119 to 122, wherein said enhanced yield-related traits comprise increased yield, preferably increased seed yield relative to control plants.
[0987] 124. Method according to any one of items 119 to 123, wherein said enhanced yield-related traits are obtained under non-stress conditions.
[0988] 125. Method according to any one of items 120 to 124, wherein said nucleic acid is operably linked to a constitutive promoter, preferably to a GOS2 promoter, most preferably to a GOS2 promoter from rice.
[0989] 126. Method according to any one of items 119 to 125, wherein said nucleic acid encoding an ASR polypeptide is of plant origin, preferably from a dicotyledonous plant, further preferably from the family Poaceae, more preferably from the genus Oryza, most preferably from Oryza sativa.
[0990] 127. Plant or part thereof, including seeds, obtainable by a method according to any one of items 119 to 126, wherein said plant or part thereof comprises a recombinant nucleic acid encoding an ASR polypeptide.
[0991] 128. Construct comprising:
   [0992] (i) nucleic acid encoding an ASR polypeptide as defined in item 119 or any one of SEQ ID NO: 401, 403, 405, 407, 409, 411, 413, 415 and 417;
   [0993] (ii) one or more control sequences capable of driving expression of the nucleic acid sequence of (a); and optionally
   [0994] (iii) a transcription termination sequence.
[0995] 129. Construct according to item 128, wherein one of said control sequences is a constitutive promoter, preferably a GOS2 promoter, most preferably a GOS2 promoter from rice.
[0996] 130. Use of a construct according to any of items 128 or 129 in a method for making plants having increased yield-related traits, particularly increased seed yield relative to control plants.
[0997] 131. Plant, plant part or plant cell transformed with a construct according to any of items 128 or 129.
[0998] 132. Method for the production of a transgenic plant having increased yield, particularly increased biomass and/or increased seed yield relative to control plants, comprising:
   [0999] (i) introducing and expressing in a plant a nucleic acid encoding an ASR polypeptide as defined in item 119; and
   [1000] (ii) cultivating the plant cell under conditions promoting plant growth and development.
[1001] 133. Transgenic plant having increased yield-related traits, particularly increased seed yield, relative to control plants, resulting from increased expression of a nucleic acid encoding an ASR polypeptide as defined in item 119, or a transgenic plant cell derived from said transgenic plant.
[1002] 134. Transgenic plant according to item 127, 131 or 133, or a transgenic plant cell derived thereof, wherein said plant is a crop plant or a monocot or a cereal, such as rice, maize, wheat, barley, millet, rye, triticale, sorghum and oats.
[1003] 135. Harvestable parts of a plant according to item 134, wherein said harvestable parts are preferably seeds.
[1004] 136. Products derived from a plant according to item 134 and/or from harvestable parts of a plant according to item 135.
[1005] 137. Use of a nucleic acid encoding an ASR polypeptide in increasing yield-related traits, particularly in increasing seed yield in plants, relative to control plants.
[1006] 138. An isolated nucleic acid molecule comprising any one of the following features:
   [1007] (i) a nucleic acid represented by any one of SEQ ID NO: 401, 403, 405, 407, 409, 411, 413, 415 and 417;
   [1008] (ii) the complement of a nucleic acid represented by any one of SEQ ID NO: 401, 403, 405, 407, 409, 411, 413, 415 and 417;
   [1009] (iii) a nucleic acid encoding an ASR polypeptide having, in increasing order of preference, at least 50%, 55%, 60%, 65%, 70%, 75%, 80%, 85%, 90%, 95%, 96%, 97%, 98%, 99% or more sequence identity to the amino acid sequence represented by any one of SEQ ID NO: 402, 404, 406, 408, 410, 412, 414, 416 and 418.
[1010] 139. An isolated polypeptide comprising:
   [1011] (i) an amino acid sequence represented by any one of SEQ ID NO: 402, 404, 406, 408, 410, 412, 414, 416 and 418;
   [1012] (ii) an amino acid sequence having, in increasing order of preference, at least 50%, 55%, 60%, 65%, 70%, 75%, 80%, 85%, 90%, 95%, 96%, 97%, 98%, 99% or more sequence identity to the amino acid sequence represented any one of SEQ ID NO: 402, 404, 406, 408, 410, 412, 414, 416 and 418.
   [1013] (iii) derivatives of any of the amino acid sequences given in (i) or (ii) above.
[1014] 140. A method for enhancing yield-related traits in plants relative to control plants, comprising modulating expression in a plant of a nucleic acid encoding a SPL11 polypeptide, wherein said SPL11 polypeptide comprises a SBP domain having in increasing order of preference at least 70%, 75%, 80%, 85%, 90%, 95%, 97% or more sequence identity to any one of SEQ ID NO: 456 to SEQ ID NO: 468 and SEQ ID NO: 478.
[1015] 141. Method according to item 140 wherein said SPL11 polypeptide in addition to the SBP domain comprises any one or more of the following conserved motifs:
   [1016] (i) Motif 1 as represented by SEQ ID NO: 469 wherein any conservative amino acid substitution and/or 1 or 2 non conservative substitution are allowed;
   [1017] (ii) Motif 2 as represented by SEQ ID NO: 470 wherein any change is allowed, provided that at least 4 amino acids have a polar side chain, preferably serine or threonine, and provided that the domain is located at the N-terminal end of the SBP domain;
   [1018] (iii) Motif 3 as represented by SEQ ID: 471 wherein 1 or 2 mismatches are allowed;
   [1019] (iv) Motif 4 as represented by SEQ ID: 472 wherein 1, 2 or 3 mismatches are allowed.
[1020] 142. Method according to item 140 or 141, wherein said modulated expression is effected by introducing and expressing in a plant a nucleic acid encoding a SPL11 polypeptide as defined in item 140 or 141.
[1021] 143. Method according to any of items 140 to 142, wherein said modulated expression is increased expression.
[1022] 144. Method according to any of items 140 to 143, wherein said nucleic acid encoding a SPL11 polypeptide encodes any one of the proteins listed in Table G1 or is a portion of such a nucleic acid, or a nucleic acid capable of hybridising with such a nucleic acid.
[1023] 145. Method according to any of items 140 to 144, wherein said nucleic acid sequence encodes an orthologue or paralogue of any of the proteins given in Table G1.
[1024] 146. Method according to item 145, wherein said nucleic acid encodes SEQ ID NO: 428.
[1025] 147. Method according to any of items 140 to 146, wherein said enhanced yield-related traits comprise increased yield, preferably increased total seed weight, number of filled seeds, number of seeds or florets per panicle, thousand-kernel weight, seed filling rate, and/or harvest index relative to control plants.
[1026] 148. Method according to any of items 140 to 147, wherein said enhanced yield-related traits comprise plant (seedling) early vigour relative to control plants.
[1027] 149. Method according to any one of items 140 to 147, wherein said enhanced yield-related traits are obtained under non-stress conditions.
[1028] 150. Method according to any one of items 140 to 147, wherein said enhanced yield-related traits are obtained under mild drought stress growth conditions.
[1029] 151. Method according to any one of items 140 to 147, wherein said enhanced yield-related traits are obtained under growth conditions of nitrogen deficiency.
[1030] 152. Method according to any one of items 140 to 151, wherein said nucleic acid is operably linked to a constitutive promoter, preferably to a GOS2 promoter, most preferably to a GOS2 promoter from rice.
[1031] 153. Method according to any one of items 140 to 151, wherein said nucleic acid is operably linked to a seed specific promoter, preferably to a WSI18 promoter, most preferably to a WSI18 promoter from rice.
[1032] 154. Method according to any of items 140 to 153, wherein said nucleic acid encoding a SPL11 polypeptide is of plant origin, preferably from a dicotyledonous plant, further preferably from the family Brassicaceae, more preferably from the genus Arabidopsis, most preferably from Arabidopsis thaliana.
[1033] 155. Plant or part thereof, including seeds, obtainable by a method according to any one of items 140 to 154, wherein said plant or part thereof comprises a recombinant nucleic acid encoding a SPL11 polypeptide.
[1034] 156. An isolated nucleic acid molecule comprising:
   [1035] (i) a nucleic acid represented by SEQ ID NO: 448;
   [1036] (ii) the complement of a nucleic acid represented by SEQ ID NO: 448;
   [1037] (iii) a nucleic acid encoding a SPL11 polypeptide having, in increasing order of preference, at least 70%, 75%, 80%, 85%, 90%, 95%, 96%, 97%, 98%, 99% or more sequence identity to the amino acid sequence represented by SEQ ID NO: 449, and having in increasing order of preference at least 70%, 75%, 80%, 85%, 90%, 95%, 96%, 97%, 98%, 99% or more sequence identity to SEQ ID NO: 465: SYCQVEGCRTDLSSAKDYHRKHRVCEPHSKAPKVVVAGLERRFCQQCSRFHG LAEFDQKKKSCRRRLNDHNARRRKPQPEAL;
   [1038] (iv) a nucleic acid hybridising under stringent conditions to SEQ ID NO: 448.
[1039] 157. An isolated polypeptide comprising:
   [1040] (i) an amino acid sequence represented by SEQ ID NO: 449;
   [1041] (ii) an amino acid sequence having, in increasing order of preference, at least 70%, 75%, 80%, 85%, 90%, 95%, 96%, 97%, 98%, 99% or more sequence identity to the amino acid sequence represented by SEQ ID NO: 449, and having in increasing order of preference at least 70%, 75%, 80%, 85%, 90%, 95%, 96%, 97%, 98%, 99% or more sequence identity to SEQ ID NO: 465: SYCQVEGCRTDLSSAKDYHRKHRVCEPHSKAPKVVVAGLERRFCQQCSRFHG LAEFDQKKKSCRRRLNDHNARRRKPQPEAL.
   [1042] (iii) derivatives of any of the amino acid sequences given in (i) or (ii) above.
[1043] 158. Construct comprising:
   [1044] (i) nucleic acid encoding a SPL11 polypeptide;
   [1045] (ii) one or more control sequences capable of driving expression of the nucleic acid sequence of (i); and optionally
   [1046] (iii) a transcription termination sequence
[1047] 159. Construct according to item 158 wherein said nucleic acid encoding a SPL11 polypeptide is a nucleic acid according to item 156.
[1048] 160. Construct according to item 158 or 159 wherein one of said control sequences is a constitutive promoter, preferably a GOS2 promoter, most preferably a GOS2 promoter from rice.
[1049] 161. Construct according to item 158 or 159 wherein one of said control sequences is a seed specific promoter, preferably a WSI18 promoter, most preferably a WSI18 promoter from rice.
[1050] 162. Use of a construct according to items 158 to 161 in a method for making plants having increased yield related traits; particularly increased seed yield relative to control plants and/or plant or seedling early vigour.
[1051] 163. Plant, plant part or plant cell transformed with a construct according to items 158 to 161.
[1052] 164. Method for the production of a transgenic plant having increased yield related traits, particularly increased seed yield and/or plant or seedling early vigour relative to control plants, comprising:
   [1053] (i) introducing and expressing in a plant a nucleic acid encoding a SPL11 polypeptide; and
   [1054] (ii) cultivating the plant cell under conditions promoting plant growth and development.
[1055] 165. Transgenic plant having increased yield, particularly increased plant seedling vigour and/or increased seed yield, relative to control plants, resulting from increased expression of a nucleic acid encoding a SPL11 polypeptide, or a transgenic plant cell derived from said transgenic plant.
[1056] 166. Transgenic plant according to item 155, 163 or 165, or a transgenic plant cell derived thereof, wherein said plant is a dicot crop plant such as soybean, cotton or canola or a monocot crop plant or a cereal, such as rice, maize, wheat, barley, millet, rye, triticale, sorghum and oats.
[1057] 167. Harvestable parts of a plant according to item 166, wherein said harvestable parts are preferably shoot biomass, flowers and/or seeds.
[1058] 168. Products derived from a plant according to item 166 and/or from harvestable parts of a plant according to item 167.
[1059] 169. Use of a nucleic acid encoding a SPL11 polypeptide in increasing yield, particularly in increasing seed yield and/or shoot biomass in plants, relative to control plants.

### DESCRIPTION OF FIGURES

[1060] The present invention will now be described with reference to the following figures in which:

### I. LOB-Domain Comprising Protein (LOB: Lateral Organ Boundaries)

[1061] FIG. 1 represents the sequence of SEQ ID NO: 2, with the DUF260 domain shown in bold, the conserved motifs 1, 2 and 3 are underlined and the conserved Cys residues (motif of SEQ ID NO: 9) are shown in italics.

[1062] FIG. 2 represents a multiple alignment of sequences of various LBD proteins useful in the methods of the present invention. Os-Os01g03890: SEQ ID NO: 11; St-TC162239: SEQ ID NO: 30; Ta-TC235711: SEQ ID NO: 25; Hv-TC147808: SEQ ID NO: 28; Os-Os01g32770: SEQ ID NO: 12; At-LBD42-Q9CA30: SEQ ID NO: 58; Pt-123.86: SEQ ID NO: 47; At-LBD40-Q9ZW96: SEQ ID NO: 56; Bn-AAP37970: SEQ ID NO: 51; At-LBD41-Q9M886: SEQ ID NO: 57; Mt-TC107091: SEQ ID NO: 27; St-TC133081: SEQ ID NO: 26; Gm-TC220806: SEQ ID NO: 33; Mt-ABE78739: SEQ ID NO: 53; Vv-TC55931: SEQ ID NO: 29; Aq-TC18329: SEQ ID NO: 35; Pt-X180: SEQ ID NO: 48; Pt-XII.481: SEQ ID NO: 49; Pta-TC67269: SEQ ID NO: 32; Pta-TC69225: SEQ ID NO: 31; Os-Os03g33090: SEQ ID NO: 13; Sb-TC104758: SEQ ID NO: 20; Os-Os07g40000: SEQ ID NO: 15; Hv-TC147776: SEQ ID NO: 19; Os-Os03g41330: SEQ ID NO: 14; Ta-TC270332: SEQ ID NO: 34; St-TC137193: SEQ ID NO: 36; St-TC133385: SEQ ID NO: 37; Le-TC178827: SEQ ID NO: 42; Nb-TC9404: SEQ ID NO: 16; Gm-TC216138: SEQ ID NO: 18; Lj-TC15459: SEQ ID NO: 23; Gm-TC227562: SEQ ID NO: 17; Ck-LOB-DQ787782: SEQ ID NO: 50; Mt-ABE82505: SEQ ID NO: 52; Pt-III.589: SEQ ID NO: 43; Pt-V.543: SEQ ID NO: 44; Vv-TC60668: SEQ ID NO: 22; Gh-TC30552: SEQ ID NO: 24; At-LBD37-Q9FN11: SEQ ID NO: 2; At-LBD38-Q9SN23: SEQ ID NO: 54; At-LBD39-Q9SZE8: SEQ ID NO: 55; Aq-TC18561: SEQ ID NO: 21; Pta-TC59178: SEQ ID NO: 40; St-TC140088: SEQ ID NO: 38; Pa-TC14656: SEQ ID NO: 39; Pta-TC67974: SEQ ID NO: 41; Pt-XIV.94: SEQ ID NO: 45; Pt-11105: SEQ ID NO: 46.

[1063] FIG. 3 shows a phylogenetic tree of class II and class I LBD proteins. The sequence of SEQ ID NO: 2 is represented by AtLBD37.

[1064] FIG. 4 represents the binary vector for increased expression in Oryza sativa of a LBD-encoding nucleic acid under the control of a rice GOS2 promoter (pGOS2)

[1065] FIG. 5 details examples of LBD sequences useful in performing the methods according to the present invention.

### II. JMJC (JUMONJI-C) Polypeptide

[1066] FIG. 6 represents the amino acid sequence and domain structure of SEQ ID NO: 74. Conserved motifs and domains are indicated. JmjC domain is indicated in bold. Conserved motifs SEQ ID NO: 79, SEQ ID NO: 80 and SEQ ID NO: 81 are indicated by single, double and triple lined rectangles respectively. Underlined are the T (Theonine) and K (Lysine) amino acid residues that typically participate in 2-Oxogutarate coordination. Capital H indicates the Histidine amino acid residue coordinating the iron ion.

[1067] FIG. 7 represents a multiple alignment of JMJC proteins. The origin of the protein is indicated by the first two alphanumeric digits in the name, At: Arabidopsis thaliana, Pp: Populus trichocarpa, Os: Oryza sativa, Ot: streococcus tauri, Ce: Caenorhabditis elegans, Hs: Homo sapiens. Position of the conserved amino acid residues and domains corresponding to those described in FIG. 6 is indicated. A consensus sequence is given. Highly conserved amino acids in the consensus sequences are given; empty blank spaces represent any amino acid. AT3G20810.3: SEQ ID NO: 479; AT3G20810.1: SEQ ID NO: 74; AT3G20810.2: SEQ ID NO: 84; PP_JMJ: SEQ ID NO: 480; Os09g0489200: SEQ ID NO: 481; Ot10g00170: SEQ ID NO: 482; ce_NP_{—}505831.1: SEQ ID NO: 483; Hs-FIH_NP_{—}060372.1: SEQ ID NO: 484; Consensus: SEQ ID NO: 485.

[1068] FIG. 8 shows a phylogenetic tree of JMJC polypeptides. The arrow shows SEQ ID NO: 74. Other JMJC polypeptides are named using the Genbank accession number. Group I (G I) comprises proteins of plant origin; Group II (GII) comprises proteins of non-plant origin.

[1069] FIG. 9 represents the binary vector for increased expression in Oryza sativa of SEQ ID NO: 73 under the control of a rice GOS2 promoter (pGOS2).

[1070] FIG. 10 details examples of JMJC sequences useful in performing the methods according to the present invention.

### III. Casein Kinase I

[1071] FIG. 11 represents the binary vector for increased expression in Oryza sativa of a GRP-encoding nucleic acid under the control of a rice WSI18 promoter (pWSI18::GRP)

[1072] FIG. 12 details examples of GRP sequences useful in performing the methods according to the present invention.

### IV. Plant Homeodomain Finger-Homeodomain (PHDf-HD) Polypeptide

[1073] FIG. 13 represents a neighbour-joining tree constructed after an alignment of all the transcription factors belonging to the HD family (downloaded from the riceTFDB database hosted at the server of the University of Potsdam) and all of the polypeptide sequences of Table D1 (when full length), performed using the Clustal algorithm (1.83) of progressive alignment, using default values. The group of interest, comprising the two rice paralogs (SEQ ID NO: 180 or Os02g05450.1, and SEQ ID NO: 202 or Os06g12400.1) has been circled. Any polypeptide falling within this HD group (after a new multiple alignment step as described hereinabove) is considered to be useful in performing the methods of the invention as described herein.

[1074] FIG. 14 represents a cartoon of a PHDf-HD polypeptide as represented by SEQ ID NO: 180, which comprises one or more of the following features: a predicted nuclear localisation signal (NLS), a leucine zipper (ZIP), a PHD finger (PHDf, Pfam00628), an acidic stretch, two basic stretches, a homeodomain (HD, Pfam00046).

[1075] FIG. 15 shows the sequence logo of the homeodomain (HD) of the PHDf-HD polypeptides of Table D1, where the overall height of the stack indicates the sequence conservation at that position, while the height of symbols within the stack indicates the relative frequency of each amino or nucleic acid at that position. The HD as represented by SEQ ID NO: 234, and comprised in SEQ ID NO: 180, is in accordance with the sequence logo as represented in this figure.

[1076] FIG. 16 shows the graphical output of the COILS algorithm predicting two coiled coil domains in the N-terminal half of the polypeptide as represented by SEQ ID NO: 180. The X axis represents the amino acid residue coordinates, the Y axis the probability (ranging from 0 to 1) that a coiled coil domain is present, and the three lines, the three windows (14, 21, 28) examined.

[1077] FIG. 17 shows a CLUSTAL W (1; 83) multiple sequence alignment of PHDf-HD polypeptides from Table D1 (when full length), where a number of features are identified. From the N-terminus to the C-terminus of the polypeptides are: (i) a predicted nuclear localisation signal (NLS); (ii) a leucine zipper (ZIP), with four heptads (boxed, in which usually a leucine (occasionally an isoleucine, a valine, or a methionine) appears every seventh amino acid); (iii) a PHD finger (PHDf), with the typical C4HC3 (four cysteines, one histidine, three cysteines) with a characteristic cysteine spacing; (iv) an acidic stretch (rich in acidic amino acids D and E); (v) basic stretches (rich in basic amino acids K and R); (vi) a homeodomain (HD). Petcr_PHDf_HD_PRHP: SEQ ID NO: 204; Poptr_PHDf_HD_I: SEQ ID NO: 190; Poptr_PHDf_HD_IV: SEQ ID NO: 220; Orysa_PHDf_HD_HAZ1: SEQ ID NO: 202; Orysa_PHDf_HD: SEQ ID NO: 180; Vitvi_PHDf_HD II: SEQ ID NO: 214; Zeama_PHDf_HD_HOX1A: SEQ ID NO: 206; Zeama_PHDf_HD_HOX1B: SEQ ID NO: 208; Eucgr_PHDf_HD: SEQ ID NO: 184; Medtr_PHDf_HD: SEQ ID NO: 186; Arath_PHDf_HD_PRHA: SEQ ID NO: 182; Poptr_PHDf_HD_II: SEQ ID NO: 216; Zeama_PHDf_HD: SEQ ID NO: 196; Zeama_PHDf_HD_HOX2A: SEQ ID NO: 210; Poptr_PHDf_HD_III: SEQ ID NO: 218; Lotja_PHDf_HD: SEQ ID NO: 200; Arath_PHDf_HD_HAT3.1: SEQ ID NO: 198; Sacof_PHDf_HD: SEQ ID NO: 192; Vitvi_PHDf_HD I: SEQ ID NO: 194; Zeama_PHDf_HD_HOX2B: SEQ ID NO: 212; Pinra_PHDf_HD: SEQ ID NO: 188.

[1078] FIG. 18 shows the binary vector for modulated, preferably increased, expression in Oryza sativa of a nucleic acid sequence encoding a PHDf-HD polypeptide under the control of a rice GOS2 promoter (pGOS2)

[1079] FIG. 19 details examples of a PHDf-HD sequences useful in performing the methods according to the present invention.

V. bHLH11-Like (Basic Helix-Loop-Helix 11) Protein

[1080] FIG. 20 represents the domain structure of SEQ ID NO: 245 with the conserved motifs indicated by underlining and their number. The HLH domain (motif 8) as determined by SMART is shown in bold underlined.

[1081] FIG. 21 represents a multiple alignment of various bHLH11-like proteins. A dot indicates conserved residues, a colon indicates highly conserved residues and an asterisk stands for perfectly conserved residues. The highest degree of sequence conservation is found in the region of the bHLH domain. The C-terminal part of AT2G24260 that extends beyond the other proteins in the alignment is deleted. AT2G24260: SEQ ID NO: 261; AT4G30980: SEQ ID NO: 262; AT5G58010: SEQ ID NO: 263; TA12416: SEQ ID NO: 270; TA5414: SEQ ID NO: 309; TC205173: SEQ ID NO: 280; GSVIVT00017237001: SEQ ID NO: 322; TC7102: SEQ ID NO: 288; TA34455: SEQ ID NO: 318; TC7103: SEQ ID NO: 289; TA37666: SEQ ID NO: 319; TC67603: SEQ ID NO: 278; Os06g08500: SEQ ID NO: 295; Os02g55250: SEQ ID NO: 293; Os09g25040: SEQ ID NO: 297; TA2544: SEQ ID NO: 268; DV982110: SEQ ID NO: 299; WO051050seqID516: SEQ ID NO: 301; AT4G02590: SEQ ID NO: 260; TC10015_part: SEQ ID NO: 266; AT1G03040: SEQ ID NO: 259; TA13791: SEQ ID NO: 275; TC60118: SEQ ID NO: 283; TC60119: SEQ ID NO: 276; TC61833: SEQ ID NO: 277; TA3392: SEQ ID NO: 269; WO051050seqID1671: SEQ ID NO: 272; Pt_TC63334: SEQ ID NO: 304; TA3263: SEQ ID NO: 300; Pt_scaff_II.416: SEQ ID NO: 308; TA2825: SEQ ID NO: 311; TC207545: SEQ ID NO: 282; TC229602: SEQ ID NO: 279; TA46156: SEQ ID NO: 323; AK247217: SEQ ID NO: 313; TA30646: SEQ ID NO: 316; TC8633: SEQ ID NO: 290; TC15501: SEQ ID NO: 264; TA1140: SEQ ID NO: 284; TA3490_part: SEQ ID NO: 286; CK293938: SEQ ID NO: 287; TC12771: SEQ ID NO: 291; TC172581: SEQ ID NO: 315; TA28621: SEQ ID NO: 317; TA21665: SEQ ID NO: 314; TA46194: SEQ ID NO: 324; DY268946: SEQ ID NO: 267; C0123623: SEQ ID NO: 273; Pt_scaff_{—}70.65: SEQ ID NO: 305; Pt_scaff_XIII.403: SEQ ID NO: 306; TA1616: SEQ ID NO: 310; TA55042: SEQ ID NO: 281; WO051050seqID77: SEQ ID NO: 271; TC3698: SEQ ID NO: 258; Os03g58330: SEQ ID NO: 294; TA139285: SEQ ID NO: 325; TabHLH11: SEQ ID NO: 245; TC104646: SEQ ID NO: 312; TA126400: SEQ ID NO: 326; Os07g08440: SEQ ID NO: 298; Os02g35660: SEQ ID NO: 292; DT543504: SEQ ID NO: 274; Pt_scaff28.86: SEQ ID NO: 307; GSVIVT00016367001: SEQ ID NO: 321; TC19278: SEQ ID NO: 265; TA14134: SEQ ID NO: 302; TC68930: SEQ ID NO: 303; TC140470: SEQ ID NO: 285; TC253044: SEQ ID NO: 320; Os06g09370: SEQ ID NO: 296.

[1082] FIG. 22 Circular cladogram of selected bHLH proteins. bHLH11-like proteins and one Arabidopsis protein representing each of the other classes defined by Heim 2003 were used. The alignment was generated using “CLUSTALX”, and a neighbour-joining tree was calculated. The circular cladogram was drawn using Dendroscope (Huson et al. BMC Bioinformatics 2007). Bootstrap results for 100 replicates is indicated for some major nodes; the boxed bootstrap value shows that the group of bHLH11-like proteins is clearly delineated from the other bHLH proteins.

[1083] FIG. 23 represents the binary vector for increased expression in Oryza sativa of a bHLH11-like-encoding nucleic acid under the control of a rice GOS2 promoter (pGOS2).

[1084] FIG. 24 details examples of bHLH11-like sequences useful in performing the methods according to the present invention.

### VI. ASR (Abscisic Acid-, Stress-, and Ripening-Induced) Protein

[1085] FIG. 25 represents the binary vector for increased expression in Oryza sativa of a GRP-encoding nucleic acid under the control of a rice GOS2 promoter (pGOS2::GRP).

[1086] FIG. 26 details examples of GRP sequences useful in performing the methods according to the present invention.

### VII. Squamosa Promoter Binding Protein-Like 11 (SPL11)

[1087] FIG. 27 represents the amino acid sequence and domain structure of SEQ ID NO: 428. Conserved motifs and domains are indicated. SBP domain is underlined by an interrupted line; Motif 1 is indicated in bold; Motif 2 is indicated in bold and underlined; Motif 3 is bold capital letters and underlined and Motif 4 is in bold and underlined with a double line.

[1088] FIG. 28 represents a multiple sequence alignment of SPL11 polypeptides. Position of the conserved amino acid residues and domains corresponding to those described in FIG. 27 is indicated. A consensus sequence representative of SPL11 polypeptides is given. In the consensus sequence the highly conserved amino acids are provided and empty blank spaces in between represent any amino acid.

[1089] FIG. 29 shows a phylogenetic tree of SPL11 polypeptides. The phylogenetic tree is as present in Xie et al. Plant Physiology, 2006, Vol. 142, pp. 280-293, which is incorporated by reference herein as if fully set forth. SPL11 polypeptides cluster in the same group as AtSPL11 (identical to SEQ ID NO: 2) within the class named Class S3.

[1090] FIGS. 30A-30B provide a sequence analysis of rice miR156 genes (OsmiR156) and their targeted sequences in rice SPL polypeptides (FIG. 30 A) as well as a multiple alignment of SPL11 nucleic acids (FIG. 30 B). FIG. 30 A shows a sequence alignment of OsmiR156 mature sequences with complementary sequences of OsSPL genes. The conserved amino acid sequence encoded by the target sequences is shown at the bottom. The dots between miR156 and targeted OsSPL sequences indicate mismatches. FIG. 4B shows a multiple alignment of SPL11 nucleic acids where in highly conserved nucleic acid residues are indicated in the consensus sequence. The position of the highly conserved miR156 target site is indicated in bold over the consensus sequence. SEQ ID NO: 431, SEQ ID NO: 440 and SEQ ID NO: 454 representatives of SPL11 nucleic acids which are miR156 insensitive do not have the conserved miR156 target site or show a great divergence in their sequence at that position. osmiR156l: SEQ ID NO: 486; osmiR156k: SEQ ID NO: 487; osmiR156(a-j): SEQ ID NO: 488; OsSPL13*: SEQ ID NO: 489; OsSPL3: SEQ ID NO: 490; OsSPL2: SEQ ID NO: 491; OsSPL14: SEQ ID NO: 491; OsSPL16: SEQ ID NO: 491; OsSPL17: SEQ ID NO: 491; OsSPL18: SEQ ID NO: 491; OsSPL4*: SEQ ID NO: 492; OsSPL11: SEQ ID NO: 492; OsSPL12: SEQ ID NO: 492; OsSPL7: SEQ ID NO: 493; amino acid: SEQ ID NO: 494.

[1091] FIGS. 31A-31B represent the binary vector for increased expression in Oryza sativa of SEQ ID NO: 427 under the control of a rice GOS2 promoter (pGOS2) (FIG. 31 A) or under a rice WSI 18 promoter (FIG. 31 B).

[1092] FIG. 32 details examples of SPL11 sequences useful in performing the methods according to the present invention.

### EXAMPLES

[1093] The present invention will now be described with reference to the following examples, which are by way of illustration alone. The following examples are not intended to completely define or otherwise limit the scope of the invention.

[1094] DNA manipulation: unless otherwise stated, recombinant DNA techniques are performed according to standard protocols described in Sambrook (2001) Molecular Cloning: a laboratory manual, 3rd Edition Cold Spring Harbor Laboratory Press, CSH, New York, or in Volumes 1 and 2 of Ausubel et al. (1994), Current Protocols in Molecular Biology, Current Protocols. Standard materials and methods for plant molecular work are described in Plant Molecular Biology Labfax (1993) by R. D. D. Croy, published by BIOS Scientific Publications Ltd (UK) and Blackwell Scientific Publications (UK).

### I. LOB-Domain Comprising Protein (LOB: Lateral Organ Boundaries)

### Example 1

### Identification of Sequences Related to the Nucleic Acid Sequence Used in the Methods of the Invention

[1095] Sequences (full length cDNA, ESTs or genomic) related to the nucleic acid sequence used in the methods of the present invention were identified amongst those maintained in the Entrez Nucleotides database at the National Center for Biotechnology Information (NCBI) using database sequence search tools, such as the Basic Local Alignment Tool (BLAST) (Altschul et al. (1990) J. Mol. Biol. 215:403-410; and Altschul et al. (1997) Nucleic Acids Res. 25:3389-3402). The program was used to find regions of local similarity between sequences by comparing nucleic acid or polypeptide sequences to sequence databases and by calculating the statistical significance of matches. For example, the polypeptide encoded by the nucleic acid used in the present invention was used for the TBLASTN algorithm, with default settings and the filter to ignore low complexity sequences set off. The output of the analysis was viewed by pairwise comparison, and ranked according to the probability score (E-value), where the score reflect the probability that a particular alignment occurs by chance (the lower the E-value, the more significant the hit). In addition to E-values, comparisons were also scored by percentage identity. Percentage identity refers to the number of identical nucleotides (or amino acids) between the two compared nucleic acid (or polypeptide) sequences over a particular length.

[1096] Table A1 provides a list of nucleic acid sequences related to the LBD nucleic acid sequence used in the methods of the present invention.

TABLE A1
Examples of LBD polypeptides: add DNA sequences of rice,
corn, wheat, canola, potato, soy, Arabidopsis

| | Nucleic acid | Protein |
|---|---|---|
| Plant Source* | SEQ ID NO: | SEQ ID NO: |
| Arabidopsis thaliana LBD protein | 1 | 2 |
| Os01g03890, Oryza sativa | 59 | 11 |
| Os01g32770, Oryza sativa | 60 | 12 |
| Os03g33090, Oryza sativa | 61 | 13 |
| Os03g41330, Oryza sativa | 62 | 14 |
| Os07g40000, Oryza sativa | 63 | 15 |
| TC9404, Nicotiana benthamiana | | 16 |
| TC227562, Glycine max | | 17 |
| TC216138, Glycine max | | 18 |
| TC147776, Hordeum vulgare | | 19 |
| TC104758, Sorghum bicolor | | 20 |
| TC18561, Aquilegia sp. | | 21 |
| TC60668, Vitis vinifera | | 22 |
| TC15459, Lotus japonicus | | 23 |
| TC30552, Gossypium hirsutum | | 24 |
| TC235711, Triticum aestivum | 71 | 25 |
| TC133081, Solanum tuberosum | | 26 |
| TC107091, Medicago truncatula | | 27 |
| TC147808, Hordeum vulgare | | 28 |
| TC55931, Vitis vinifera | | 29 |
| TC162239, Solanum tuberosum | | 30 |
| TC69225, Pinus taeda | | 31 |
| TC67269, Pinus taeda | | 32 |
| TC220806, Glycine max | | 33 |
| TC270332, Triticum aestivum | | 34 |
| TC18329, Aquilegia sp. | | 35 |
| TC137193, Solanum tuberosum | | 36 |
| TC133385, Solanum tuberosum | | 37 |
| TC140088, Solanum tuberosum | | 38 |
| TC14656, Picea alba | | 39 |
| TC59178, Pinus taeda | | 40 |
| TC67974, Pinus taeda | | 41 |
| TC178827, Lycopersicon esculentum | | 42 |
| Pt-III.589, Populus tremuloides | | 43 |
| Pt-V.543, Populus tremuloides | | 44 |
| Pt-XIV.94, Populus tremuloides | | 45 |
| Pt-II105, Populus tremuloides | | 46 |
| Pt-123.86, Populus tremuloides | | 47 |
| Pt-X180, Populus tremuloides | | 48 |
| Pt-XII.481, Populus tremuloides | | 49 |
| DQ787782, Caragana korshinskii | | 50 |
| AAP37970, Brassica napus | | 51 |
| ABE82505, Medicago truncatula | 72 | 52 |
| ABE78739, Medicago truncatula | | 53 |
| Q9SN23, Arabidopsis thaliana | 64 | 54 |
| Q9SZE8, Arabidopsis thaliana | 65 | 55 |
| Q9ZW96, Arabidopsis thaliana | 66 | 56 |
| Q9M886,Arabidopsis thaliana | 67 | 57 |
| Q9CA30, Arabidopsis thaliana | 68 | 58 |
| Ls_LBD, Linum usitatissimum | 69 | 70 |

*GenBank or SwissProt database accession numbers are provided where available, TC codes are from TIGR.

### Example 2

### Alignment of LBD Polypeptide Sequences

[1097] Alignment of polypeptide sequences was performed using the AlignX programme from the Vector NTI (Invitrogen) which is based on the popular Clustal W algorithm of progressive alignment (Thompson et al. (1997) Nucleic Acids Res 25:4876-4882; Chenna et al. (2003). Nucleic Acids Res 31:3497-3500). Default values were for the gap open penalty of 10, for the gap extension penalty of 0.1 and the selected weight matrix is Blosum 62. Minor manual editing was done to further optimise the alignment. Sequence conservation among LBD polypeptides was essentially in the N-terminal DUF260 domain of the polypeptides, the C-terminal region usually being more variable in sequence length and composition. The LBD polypeptides are aligned in FIG. 2.

[1098] A phylogenetic tree of LBD polypeptides (FIG. 3) was constructed using a neighbour-joining clustering algorithm as provided in the AlignX programme from the Vector NTI (Invitrogen). The sequences of class I LBD proteins used in the construction of the tree are publicly available and are indicated with their GenBank or SwissProt accession numbers.

### Example 3

### Calculation of Global Percentage Identity Between Polypeptide Sequences Useful in Performing the Methods of the Invention

[1099] Global percentages of similarity and identity between full length polypeptide sequences useful in performing the methods of the invention were determined using one of the methods available in the art, the MatGAT (Matrix Global Alignment Tool) software (BMC Bioinformatics. 2003 4:29. MatGAT: an application that generates similarity/identity matrices using protein or DNA sequences. Campanella J J, Bitincka L, Smalley J; software hosted by Ledion Bitincka). MatGAT software generates similarity/identity matrices for DNA or protein sequences without needing pre-alignment of the data. The program performs a series of pair-wise alignments using the Myers and Miller global alignment algorithm (with a gap opening penalty of 12, and a gap extension penalty of 2), calculates similarity and identity using for example Blosum 62 (for polypeptides), and then places the results in a distance matrix. Sequence similarity is shown in the bottom half of the dividing line and sequence identity is shown in the top half of the diagonal dividing line.

[1100] Parameters used in the comparison were:
[1101] Scoring matrix: Blosum62
[1102] First Gap: 12
[1103] Extending gap: 2

[1104] Results of the software analysis are shown in Table B for the global similarity and identity over the full length of the polypeptide sequences. Percentage identity is given above the diagonal in bold and percentage similarity is given below the diagonal (normal face).

[1105] The percentage identity between the LBD polypeptide sequences useful in performing the methods of the invention can be as low as 30.2% amino acid identity compared to SEQ ID NO: 2 (represented by At-LBD37, row 44). The % identity will likely be higher when only the sequences of the DUF260 domain are compared. To identify the DUF260 domain (as delineated in FIG. 1) in other LBD proteins, the multiple alignment of FIG. 2 may be used.

TABLE A2
MatGAT results for global similarity and identity over the full length of the LBD
polypeptide sequences.

| | | 1 | 2 | 3 | 4 | 5 | 6 | 7 | 8 | 9 | 10 | 11 | 12 |
|---|---|---|---|---|---|---|---|---|---|---|---|---|---|
| 1. | Os-Os01g03890 | | 43.2 | 35.8 | 34.5 | 34.4 | 32.9 | 33.0 | 35.5 | 35.2 | 34.5 | 31.5 | 32.2 |
| 2. | Os-Os01g32770 | 55.5 | | 31.0 | 31.1 | 31.5 | 30.3 | 32.4 | 30.7 | 30.6 | 30.9 | 29.8 | 31.2 |
| 3. | Os-Os03g33090 | 46.9 | 40.3 | | 48.3 | 65.0 | 56.7 | 53.9 | 52.1 | 66.7 | 71.3 | 51.5 | 55.0 |
| 4. | Os-Os03g41330 | 46.3 | 43.0 | 60.3 | | 48.3 | 43.0 | 43.2 | 41.2 | 46.4 | 48.6 | 40.2 | 45.1 |
| 5. | Os-Os07g40000 | 45.9 | 40.9 | 73.0 | 59.9 | | 53.0 | 50.6 | 49.6 | 68.0 | 63.1 | 47.6 | 52.3 |
| 6. | Nb-TC9404 | 45.9 | 42.4 | 66.5 | 60.3 | 67.7 | | 60.7 | 60.3 | 51.7 | 51.5 | 56.7 | 66.5 |
| 7. | Gm-TC227562 | 45.0 | 44.5 | 65.2 | 59.1 | 65.2 | 75.2 | | 73.7 | 50.6 | 49.4 | 55.2 | 64.8 |
| 8. | Gm-TC216138 | 47.2 | 41.5 | 63.3 | 58.8 | 62.1 | 70.4 | 79.6 | | 50.0 | 48.8 | 53.3 | 65.3 |
| 9. | Hv-TC147776 | 45.9 | 41.5 | 76.1 | 58.6 | 79.6 | 69.2 | 67.4 | 63.8 | | 58.7 | 47.3 | 52.2 |
| 10. | Sb-TC104758 | 45.3 | 40.6 | 77.0 | 59.6 | 71.1 | 63.0 | 62.6 | 58.8 | 68.5 | | 49.0 | 51.7 |
| 11. | Aq-TC18561 | 47.2 | 43.3 | 61.5 | 56.9 | 62.3 | 67.5 | 69.7 | 63.8 | 67.1 | 61.7 | | 58.1 |
| 12. | Vv-TC60668 | 45.0 | 43.3 | 65.4 | 59.1 | 66.7 | 79.4 | 77.4 | 77.1 | 66.2 | 64.7 | 72.7 | |
| 13. | Lj-TC15459 | 45.6 | 40.9 | 64.1 | 59.1 | 64.1 | 72.2 | 81.4 | 88.8 | 67.5 | 61.6 | 70.5 | 79.3 |
| 14. | Gh-TC30552 | 46.3 | 43.0 | 66.8 | 63.4 | 64.7 | 75.9 | 78.4 | 75.4 | 66.8 | 64.3 | 72.8 | 82.8 |
| 15. | Ta-TC235711 | 56.7 | 61.5 | 42.9 | 43.2 | 46.3 | 46.7 | 46.3 | 47.4 | 47.0 | 44.6 | 48.4 | 45.6 |
| 16. | St-TC133081 | 59.0 | 55.8 | 47.4 | 48.5 | 47.1 | 50.7 | 49.6 | 47.4 | 49.3 | 48.9 | 50.4 | 50.0 |
| 17. | Mt-TC107091 | 58.6 | 60.0 | 45.5 | 46.2 | 43.5 | 46.5 | 46.2 | 47.2 | 42.5 | 44.9 | 49.2 | 49.2 |
| 18. | Hv-TC147808 | 59.0 | 64.8 | 42.1 | 42.1 | 44.7 | 44.4 | 46.7 | 46.0 | 45.0 | 44.7 | 44.4 | 45.0 |
| 19. | Vv-TC55931 | 57.0 | 55.2 | 49.4 | 47.8 | 46.2 | 53.0 | 51.4 | 49.8 | 48.2 | 46.2 | 53.8 | 51.8 |
| 20. | St-TC162239 | 49.5 | 48.2 | 50.4 | 52.6 | 51.7 | 54.7 | 54.7 | 55.0 | 46.6 | 51.1 | 57.7 | 56.8 |
| 21. | Pta-TC69225 | 53.0 | 50.0 | 38.9 | 41.6 | 40.4 | 44.9 | 44.9 | 43.1 | 43.1 | 41.9 | 44.9 | 44.6 |
| 22. | Pta-TC67269 | 51.8 | 52.7 | 39.6 | 41.4 | 39.3 | 42.6 | 42.9 | 41.4 | 43.2 | 40.8 | 44.0 | 42.6 |
| 23. | Gm-TC220806 | 45.9 | 46.1 | 56.4 | 49.1 | 51.3 | 54.5 | 52.6 | 51.7 | 52.3 | 48.5 | 52.4 | 53.5 |
| 24. | Ta-TC270332 | 41.4 | 40.6 | 56.5 | 84.5 | 59.1 | 61.3 | 59.1 | 57.1 | 60.0 | 57.9 | 59.7 | 58.7 |
| 25. | Aq-TC18329 | 62.5 | 61.5 | 46.6 | 47.9 | 44.1 | 50.0 | 50.7 | 47.6 | 44.8 | 45.2 | 51.4 | 49.7 |
| 26. | St-TC137193 | 45.6 | 42.1 | 68.7 | 57.3 | 65.9 | 89.3 | 72.6 | 70.4 | 68.9 | 61.3 | 74.0 | 77.6 |
| 27. | St-TC133385 | 45.6 | 41.8 | 70.8 | 56.9 | 66.4 | 87.9 | 71.3 | 68.3 | 66.2 | 62.1 | 70.6 | 76.3 |
| 28. | St-TC140088 | 44.3 | 42.1 | 64.5 | 51.3 | 61.5 | 71.0 | 68.3 | 65.8 | 65.8 | 60.9 | 68.4 | 70.2 |
| 29. | Pa-TC14656 | 48.5 | 45.2 | 47.7 | 46.9 | 48.4 | 51.6 | 52.7 | 52.7 | 47.3 | 48.0 | 53.4 | 53.8 |
| 30. | Pta-TC59178 | 47.7 | 45.2 | 40.5 | 40.2 | 43.5 | 44.1 | 43.3 | 44.6 | 44.1 | 40.5 | 46.8 | 46.6 |
| 31. | Pta-TC67974 | 48.2 | 45.2 | 50.0 | 48.2 | 46.4 | 52.5 | 52.2 | 54.3 | 48.6 | 49.3 | 54.0 | 54.3 |
| 32. | Le-TC178827 | 45.9 | 41.8 | 68.3 | 57.8 | 66.8 | 89.7 | 73.9 | 71.7 | 67.6 | 62.1 | 73.6 | 78.1 |
| 33. | Pt-III.589 | 45.0 | 43.9 | 63.0 | 60.1 | 62.6 | 73.5 | 76.5 | 79.6 | 68.5 | 64.3 | 69.7 | 79.0 |
| 34. | Pt-V.543 | 48.2 | 43.9 | 64.5 | 60.3 | 60.7 | 74.0 | 76.4 | 77.7 | 66.5 | 63.6 | 68.6 | 77.3 |
| 35. | Pt-XIV.94 | 41.7 | 39.4 | 64.4 | 56.0 | 58.0 | 63.4 | 61.3 | 58.8 | 61.3 | 55.7 | 64.9 | 64.5 |
| 36. | Pt-II105 | 43.0 | 39.1 | 63.9 | 54.7 | 58.0 | 60.7 | 63.0 | 58.8 | 65.3 | 56.6 | 63.6 | 65.8 |
| 37. | Pt-123.86 | 57.7 | 57.9 | 47.6 | 46.3 | 46.3 | 46.6 | 48.6 | 47.6 | 43.6 | 45.9 | 47.3 | 45.9 |
| 38. | Pt-X180 | 52.1 | 49.4 | 50.2 | 51.0 | 49.8 | 54.8 | 55.6 | 55.2 | 48.5 | 50.2 | 56.0 | 57.7 |
| 39. | Pt-XII.481 | 51.5 | 47.3 | 43.6 | 45.8 | 44.7 | 48.4 | 46.5 | 49.5 | 46.5 | 46.9 | 46.9 | 50.9 |
| 40. | Ck-LOB- | 48.5 | 43.3 | 66.7 | 59.5 | 60.6 | 73.2 | 82.3 | 82.1 | 65.8 | 61.7 | 71.4 | 77.5 |
| | DQ787782 | | | | | | | | | | | | |
| 41. | Bn-AAP37970 | 56.0 | 56.1 | 48.9 | 49.6 | 46.2 | 49.6 | 50.4 | 51.9 | 50.0 | 47.0 | 50.0 | 51.5 |
| 42. | Mt-ABE82505 | 47.2 | 44.2 | 65.2 | 62.2 | 65.2 | 72.5 | 79.8 | 80.8 | 64.8 | 64.3 | 71.7 | 76.8 |
| 43. | Mt-ABE78739 | 54.7 | 56.7 | 45.7 | 48.9 | 44.6 | 50.7 | 50.4 | 49.6 | 47.1 | 47.8 | 51.1 | 50.4 |
| 44. | At-LBD37- | 45.0 | 46.1 | 61.6 | 56.4 | 64.0 | 68.8 | 68.8 | 69.6 | 64.0 | 63.6 | 64.0 | 68.8 |
| | Q9FN11 | | | | | | | | | | | | |
| 45. | At-LBD38- | 45.9 | 45.2 | 61.9 | 55.5 | 63.2 | 61.9 | 70.4 | 70.4 | 62.8 | 63.6 | 67.6 | 70.9 |
| | Q9SN23 | | | | | | | | | | | | |
| 46. | At-LBD39- | 45.0 | 41.8 | 61.3 | 56.7 | 63.3 | 65.8 | 70.8 | 67.9 | 60.0 | 62.5 | 70.4 | 71.7 |
| | Q9SZE8 | | | | | | | | | | | | |
| 47. | At-LBD40- | 53.1 | 49.1 | 54.5 | 54.1 | 55.8 | 55.8 | 54.9 | 52.5 | 53.2 | 56.2 | 60.9 | 56.7 |
| | Q9ZW96 | | | | | | | | | | | | |
| 48. | At-LBD41- | 52.8 | 56.7 | 44.9 | 49.0 | 47.5 | 49.8 | 50.6 | 47.9 | 49.8 | 47.1 | 51.0 | 50.2 |
| | Q9M886 | | | | | | | | | | | | |
| 49. | At-LBD42- | 52.4 | 49.4 | 54.1 | 50.2 | 51.9 | 58.4 | 57.5 | 52.9 | 54.1 | 52.8 | 55.4 | 55.4 |
| | Q9CA30 | | | | | | | | | | | | |
| | | 13 | 14 | 15 | 16 | 17 | 18 | 19 | 20 | 21 | 22 | 23 | 24 |
| 1. | Os-Os01g03890 | 33.7 | 33.0 | 42.5 | 46.6 | 42.9 | 43.5 | 42.8 | 37.7 | 36.0 | 36.8 | 38.1 | 32.2 |
| 2. | Os-Os01g32770 | 30.1 | 32.4 | 52.2 | 46.5 | 47.1 | 54.4 | 41.7 | 37.0 | 37.1 | 38.2 | 39.7 | 30.9 |
| 3. | Os-Os03g33090 | 54.0 | 54.5 | 32.4 | 37.0 | 34.4 | 31.3 | 37.2 | 37.6 | 30.2 | 28.3 | 41.3 | 47.4 |
| 4. | Os-Os03g41330 | 41.2 | 44.1 | 32.1 | 33.1 | 30.2 | 31.4 | 36.4 | 37.0 | 29.9 | 28.4 | 35.5 | 78.7 |
| 5. | Os-Os07g40000 | 50.0 | 51.7 | 34.7 | 35.8 | 33.9 | 33.2 | 35.2 | 36.5 | 28.7 | 28.3 | 38.7 | 46.3 |
| 6. | Nb-TC9404 | 60.8 | 63.7 | 33.7 | 35.8 | 33.2 | 32.1 | 38.7 | 38.1 | 32.3 | 29.8 | 39.6 | 44.0 |
| 7. | Gm-TC227562 | 72.4 | 67.6 | 33.1 | 34.7 | 33.2 | 33.1 | 36.6 | 36.2 | 32.3 | 30.7 | 39.3 | 42.8 |
| 8. | Gm-TC216138 | 81.5 | 66.5 | 34.4 | 34.2 | 33.2 | 33.2 | 37.0 | 35.7 | 31.1 | 30.7 | 37.6 | 42.3 |
| 9. | Hv-TC147776 | 50.8 | 51.9 | 34.9 | 35.4 | 31.6 | 32.6 | 36.8 | 34.6 | 29.3 | 28.6 | 37.9 | 45.4 |
| 10. | Sb-TC104758 | 49.4 | 51.3 | 33.8 | 34.5 | 32.5 | 33.1 | 35.3 | 38.0 | 29.6 | 30.1 | 37.4 | 46.9 |
| 11. | Aq-TC18561 | 54.8 | 58.5 | 33.4 | 35.0 | 34.2 | 32.1 | 37.5 | 37.6 | 32.3 | 30.8 | 37.3 | 41.1 |
| 12. | Vv-TC60668 | 65.6 | 68.3 | 33.1 | 35.6 | 35.9 | 32.1 | 36.2 | 38.5 | 33.3 | 32.0 | 39.6 | 43.5 |
| 13. | Lj-TC15459 | | 64.9 | 34.5 | 33.2 | 33.8 | 33.4 | 36.0 | 36.5 | 34.1 | 29.4 | 36.8 | 39.6 |
| 14. | Gh-TC30552 | 76.8 | | 36.2 | 35.4 | 33.9 | 34.1 | 37.5 | 36.9 | 32.0 | 30.7 | 40.1 | 44.2 |
| 15. | Ta-TC235711 | 47.4 | 49.5 | | 45.5 | 49.5 | 89.9 | 49.1 | 41.3 | 37.8 | 36.4 | 46.0 | 31.8 |
| 16. | St-TC133081 | 50.0 | 50.4 | 57.5 | | 56.6 | 47.4 | 52.5 | 45.4 | 37.4 | 40.1 | 50.0 | 32.5 |
| 17. | Mt-TC107091 | 48.2 | 47.5 | 61.5 | 66.4 | | 50.5 | 48.8 | 41.6 | 36.4 | 39.5 | 51.7 | 31.2 |
| 18. | Hv-TC147808 | 45.4 | 47.7 | 92.4 | 59.6 | 63.2 | | 48.3 | 39.0 | 37.8 | 39.1 | 43.7 | 31.8 |
| 19. | Vv-TC55931 | 51.8 | 51.4 | 60.3 | 63.1 | 61.1 | 57.9 | | 47.0 | 35.8 | 38.1 | 51.2 | 36.4 |
| 20. | St-TC162239 | 54.9 | 55.1 | 55.7 | 58.8 | 52.8 | 52.3 | 63.2 | | 32.9 | 36.0 | 48.7 | 37.7 |
| 21. | Pta-TC69225 | 46.4 | 44.0 | 50.9 | 51.5 | 53.0 | 51.2 | 47.9 | 43.1 | | 44.5 | 32.9 | 27.8 |
| 22. | Pta-TC67269 | 42.3 | 44.3 | 50.9 | 54.8 | 52.4 | 52.4 | 50.0 | 46.4 | 63.1 | | 35.3 | 28.6 |
| 23. | Gm-TC220806 | 51.1 | 54.7 | 51.6 | 55.8 | 55.5 | 49.0 | 57.3 | 60.7 | 40.1 | 42.0 | | 35.8 |
| 24. | Ta-TC270332 | 54.9 | 61.2 | 44.3 | 45.3 | 44.2 | 42.7 | 47.8 | 50.9 | 41.0 | 40.2 | 51.7 | |
| 25. | Aq-TC18329 | 49.7 | 51.0 | 63.8 | 70.0 | 70.8 | 65.2 | 65.9 | 55.5 | 52.1 | 53.6 | 54.1 | 45.9 |
| 26. | St-TC137193 | 71.3 | 74.6 | 46.0 | 48.9 | 48.5 | 45.4 | 52.6 | 52.1 | 43.1 | 41.7 | 57.1 | 58.7 |
| 27. | St-TC133385 | 70.0 | 73.3 | 43.9 | 48.9 | 46.5 | 43.0 | 52.6 | 53.0 | 41.9 | 41.4 | 57.1 | 57.0 |
| 28. | St-TC140088 | 66.7 | 70.3 | 45.3 | 47.4 | 46.8 | 43.0 | 53.0 | 52.6 | 42.5 | 41.1 | 55.3 | 52.2 |
| 29. | Pa-TC14656 | 51.6 | 53.4 | 50.2 | 49.8 | 48.2 | 50.0 | 46.6 | 52.3 | 47.3 | 46.1 | 44.8 | 44.8 |
| 30. | Pta-TC59178 | 44.4 | 45.7 | 41.6 | 44.9 | 46.6 | 44.9 | 44.4 | 42.7 | 47.4 | 49.6 | 39.1 | 40.2 |
| 31. | Pta-TC67974 | 50.7 | 54.3 | 49.1 | 50.0 | 48.2 | 47.0 | 47.8 | 51.8 | 46.4 | 48.2 | 46.7 | 47.8 |
| 32. | Le-TC178827 | 72.6 | 75.4 | 46.7 | 48.9 | 48.2 | 43.7 | 53.0 | 52.1 | 42.5 | 43.2 | 56.9 | 58.3 |
| 33. | Pt-III.589 | 78.6 | 81.9 | 50.5 | 51.5 | 48.5 | 47.0 | 55.3 | 57.1 | 44.3 | 44.6 | 53.4 | 58.0 |
| 34. | Pt-V.543 | 76.9 | 79.8 | 49.1 | 52.2 | 49.2 | 48.0 | 53.0 | 56.2 | 45.2 | 45.5 | 53.3 | 57.0 |
| 35. | Pt-XIV.94 | 59.9 | 62.5 | 44.9 | 45.6 | 42.5 | 44.0 | 48.2 | 51.7 | 41.6 | 41.4 | 56.3 | 57.8 |
| 36. | Pt-II105 | 61.6 | 62.5 | 43.9 | 47.4 | 43.5 | 42.1 | 47.4 | 55.1 | 38.9 | 40.8 | 56.7 | 55.2 |
| 37. | Pt-123.86 | 47.6 | 48.3 | 56.1 | 67.2 | 75.4 | 55.3 | 61.8 | 54.7 | 53.3 | 51.5 | 55.1 | 43.9 |
| 38. | Pt-X180 | 56.0 | 56.8 | 53.0 | 56.6 | 55.1 | 51.0 | 66.4 | 59.8 | 48.8 | 47.6 | 60.2 | 49.8 |
| 39. | Pt-XII.481 | 48.4 | 50.2 | 52.3 | 58.0 | 53.8 | 49.7 | 58.2 | 54.6 | 45.5 | 49.1 | 51.3 | 44.0 |
| 40. | Ck-LOB-DQ787782 | 80.2 | 79.3 | 49.1 | 51.8 | 46.5 | 47.0 | 53.0 | 54.3 | 43.7 | 44.9 | 53.2 | 58.0 |
| 41. | Bn-AAP37970 | 47.0 | 51.1 | 58.9 | 65.7 | 67.4 | 56.0 | 60.2 | 57.6 | 47.6 | 48.5 | 56.8 | 47.3 |
| 42. | Mt-ABE82505 | 78.9 | 77.7 | 50.2 | 50.7 | 47.8 | 48.7 | 54.2 | 54.3 | 44.9 | 45.8 | 52.8 | 61.8 |
| 43. | Mt-ABE78739 | 53.6 | 50.4 | 59.2 | 66.9 | 71.8 | 60.3 | 64.4 | 54.0 | 52.4 | 49.7 | 56.5 | 46.4 |
| 44. | At-LBD37-Q9FN11 | 67.6 | 75.2 | 48.8 | 54.0 | 49.5 | 47.0 | 54.9 | 55.6 | 45.2 | 44.6 | 52.0 | 56.4 |
| 45. | At-LBD38-Q9SN23 | 63.6 | 73.7 | 48.4 | 51.1 | 48.8 | 47.0 | 51.8 | 55.1 | 46.4 | 46.1 | 52.2 | 53.0 |
| 46. | At-LBD39-Q9SZE8 | 73.8 | 70.0 | 48.8 | 50.4 | 47.8 | 47.4 | 52.6 | 53.8 | 45.2 | 43.8 | 51.7 | 61.7 |
| 47. | At-LBD40-Q9ZW96 | 53.2 | 56.2 | 54.4 | 61.7 | 62.1 | 51.3 | 60.9 | 61.5 | 48.5 | 48.2 | 62.2 | 52.8 |
| 48. | At-LBD41-Q9M886 | 49.8 | 52.1 | 56.8 | 67.5 | 67.4 | 57.0 | 61.2 | 58.9 | 49.1 | 49.1 | 57.4 | 46.0 |
| 49. | At-LBD42-Q9CA30 | 56.1 | 54.5 | 54.0 | 54.7 | 54.5 | 51.3 | 60.5 | 64.5 | 47.0 | 45.8 | 62.7 | 51.1 |
| | | 25 | 26 | 27 | 28 | 29 | 30 | 31 | 32 | 33 | 34 | 35 | 36 |
| 1. | Os-Os01g03890 | 44.0 | 32.9 | 33.6 | 32.2 | 32.4 | 32.5 | 32.1 | 33.5 | 33.7 | 33.7 | 33.2 | 33.2 |
| 2. | Os-Os01g32770 | 46.3 | 30.0 | 29.4 | 29.7 | 28.1 | 29.4 | 30.4 | 30.9 | 30.6 | 29.1 | 30.0 | 31.5 |
| 3. | Os-Os03g33090 | 33.3 | 61.0 | 60.2 | 50.0 | 35.7 | 33.9 | 38.7 | 60.0 | 52.9 | 52.9 | 50.2 | 51.7 |
| 4. | Os-Os03g41330 | 31.7 | 44.0 | 44.0 | 39.0 | 36.7 | 30.2 | 36.1 | 44.7 | 41.0 | 41.0 | 41.0 | 39.7 |
| 5. | Os-Os07g40000 | 34.1 | 52.6 | 52.5 | 46.8 | 35.3 | 33.3 | 37.5 | 51.9 | 49.6 | 48.6 | 46.5 | 46.0 |
| 6. | Nb-TC9404 | 36.6 | 83.2 | 82.3 | 57.5 | 38.9 | 36.9 | 41.9 | 83.2 | 64.2 | 64.9 | 50.2 | 49.1 |
| 7. | Gm-TC227562 | 35.2 | 61.1 | 60.3 | 51.0 | 39.8 | 36.6 | 41.1 | 62.1 | 65.3 | 64.5 | 48.5 | 48.5 |
| 8. | Gm-TC216138 | 34.1 | 61.4 | 60.2 | 51.7 | 38.2 | 34.9 | 40.2 | 61.7 | 67.2 | 66.8 | 47.5 | 46.9 |
| 9. | Hv-TC147776 | 32.8 | 54.2 | 54.6 | 50.2 | 33.8 | 32.7 | 35.7 | 53.6 | 50.0 | 49.8 | 46.2 | 47.3 |
| 10. | Sb-TC104758 | 31.4 | 51.7 | 51.5 | 46.7 | 35.6 | 33.1 | 37.5 | 49.0 | 52.5 | 50.2 | 43.8 | 45.1 |
| 11. | Aq-TC18561 | 35.5 | 59.3 | 58.8 | 52.8 | 38.3 | 36.4 | 40.5 | 58.0 | 56.8 | 59.4 | 52.6 | 48.5 |
| 12. | Vv-TC60668 | 35.1 | 67.1 | 67.2 | 54.5 | 39.6 | 36.6 | 42.3 | 66.5 | 69.4 | 66.7 | 50.9 | 50.4 |
| 13. | Lj-TC15459 | 33.4 | 59.7 | 59.2 | 51.0 | 37.4 | 37.6 | 39.2 | 60.7 | 65.6 | 64.9 | 47.9 | 47.9 |
| 14. | Gh-TC30552 | 35.2 | 63.9 | 63.4 | 57.3 | 39.4 | 37.2 | 41.6 | 64.2 | 71.4 | 70.9 | 50.0 | 50.0 |
| 15. | Ta-TC235711 | 50.3 | 33.8 | 32.8 | 32.4 | 29.5 | 31.0 | 30.8 | 34.5 | 36.2 | 34.8 | 33.4 | 34.5 |
| 16. | St-TC133081 | 57.4 | 33.2 | 34.7 | 32.5 | 30.9 | 32.1 | 32.6 | 35.4 | 36.4 | 36.0 | 35.0 | 34.2 |
| 17. | Mt-TC107091 | 56.8 | 34.2 | 33.6 | 33.1 | 31.5 | 32.0 | 31.0 | 33.9 | 33.8 | 35.2 | 29.6 | 30.8 |
| 18. | Hv-TC147808 | 50.6 | 34.4 | 31.5 | 29.1 | 31.4 | 31.6 | 30.3 | 33.1 | 34.8 | 34.8 | 32.1 | 32.5 |
| 19. | Vv-TC55931 | 56.3 | 37.5 | 39.2 | 36.6 | 33.8 | 31.2 | 34.9 | 38.4 | 37.3 | 35.5 | 36.8 | 35.9 |
| 20. | St-TC162239 | 41.8 | 36.3 | 37.2 | 35.0 | 35.6 | 32.0 | 35.7 | 37.6 | 39.0 | 37.3 | 37.6 | 37.9 |
| 21. | Pta-TC69225 | 36.9 | 30.5 | 31.6 | 29.6 | 30.5 | 30.7 | 31.2 | 29.9 | 31.7 | 31.8 | 31.1 | 30.2 |
| 22. | Pta-TC67269 | 43.1 | 30.1 | 29.2 | 29.2 | 28.5 | 30.0 | 32.2 | 31.5 | 29.5 | 31.0 | 29.8 | 29.8 |
| 23. | Gm-TC220806 | 50.0 | 43.4 | 42.1 | 38.4 | 34.7 | 28.1 | 35.5 | 42.8 | 39.6 | 38.5 | 40.5 | 41.9 |
| 24. | Ta-TC270332 | 32.1 | 45.5 | 43.5 | 39.2 | 35.7 | 30.3 | 36.8 | 43.3 | 41.3 | 40.9 | 40.9 | 39.7 |
| 25. | Aq-TC18329 | | 35.5 | 35.2 | 31.4 | 30.2 | 33.1 | 31.5 | 34.8 | 33.4 | 35.5 | 33.4 | 34.1 |
| 26. | St-TC137193 | 48.6 | | 96.8 | 58.4 | 38.8 | 36.1 | 41.9 | 95.0 | 64.3 | 62.5 | 50.2 | 50.2 |
| 27. | St-TC133385 | 48.6 | 96.8 | | 59.7 | 38.1 | 35.8 | 40.1 | 92.8 | 63.9 | 60.9 | 50.7 | 50.9 |
| 28. | St-TC140088 | 47.9 | 72.4 | 71.9 | | 38.8 | 33.2 | 39.8 | 58.7 | 54.1 | 53.8 | 46.3 | 45.6 |
| 29. | Pa-TC14656 | 49.7 | 51.6 | 51.6 | 54.2 | | 38.6 | 88.1 | 38.7 | 42.1 | 40.3 | 33.5 | 33.5 |
| 30. | Pta-TC59178 | 46.0 | 44.9 | 44.6 | 43.3 | 54.3 | | 39.4 | 36.9 | 36.4 | 38.4 | 32.5 | 31.4 |
| 31. | Pta-TC67974 | 49.3 | 52.2 | 51.4 | 52.9 | 92.8 | 53.2 | | 41.7 | 42.5 | 42.8 | 35.0 | 36.1 |
| 32. | Le-TC178827 | 48.3 | 97.2 | 95.0 | 71.6 | 50.9 | 45.2 | 51.4 | | 64.6 | 62.2 | 49.5 | 49.5 |
| 33. | Pt-III.589 | 49.7 | 73.5 | 72.3 | 65.5 | 54.2 | 44.9 | 56.5 | 75.2 | | 83.3 | 50.4 | 48.7 |
| 34. | Pt-V.543 | 50.3 | 73.6 | 71.5 | 64.0 | 54.2 | 46.8 | 56.2 | 73.1 | 88.8 | | 50.8 | 48.3 |
| 35. | Pt-XIV.94 | 47.9 | 63.1 | 63.2 | 62.7 | 47.7 | 39.7 | 51.1 | 61.0 | 63.4 | 62.0 | | 86.1 |
| 36. | Pt-II105 | 47.2 | 63.1 | 64.6 | 60.4 | 48.4 | 39.4 | 51.8 | 61.5 | 62.2 | 59.9 | 91.8 | |
| 37. | Pt-123.86 | 70.9 | 48.0 | 46.6 | 48.6 | 49.7 | 47.1 | 50.7 | 46.6 | 49.0 | 50.0 | 43.9 | 42.9 |
| 38. | Pt-X180 | 61.0 | 51.9 | 51.9 | 53.5 | 46.2 | 41.6 | 46.7 | 53.5 | 58.5 | 58.3 | 50.2 | 48.5 |
| 39. | Pt-XII.481 | 60.0 | 50.5 | 49.5 | 46.9 | 49.5 | 41.6 | 50.0 | 50.9 | 49.5 | 49.5 | 45.1 | 42.1 |
| 40. | Ck-LOB-DQ787782 | 47.2 | 72.3 | 71.4 | 68.8 | 53.4 | 44.1 | 54.7 | 71.9 | 79.4 | 78.9 | 60.6 | 62.3 |
| 41. | Bn-AAP37970 | 65.2 | 52.3 | 50.8 | 47.0 | 47.7 | 44.1 | 50.0 | 50.8 | 49.6 | 51.5 | 50.4 | 49.2 |
| 42. | Mt-ABE82505 | 50.3 | 70.4 | 69.1 | 67.0 | 57.4 | 46.8 | 55.1 | 71.2 | 76.9 | 78.9 | 62.7 | 62.2 |
| 43. | Mt-ABE78739 | 67.2 | 50.0 | 50.0 | 50.7 | 54.7 | 43.3 | 53.2 | 48.2 | 49.6 | 48.6 | 50.0 | 48.9 |
| 44. | At-LBD37-Q9FN11 | 51.4 | 66.8 | 65.6 | 64.4 | 54.2 | 47.9 | 52.9 | 67.2 | 76.0 | 74.0 | 60.8 | 60.4 |
| 45. | At-LBD38-Q9SN23 | 49.7 | 65.6 | 64.4 | 60.3 | 52.3 | 44.9 | 53.6 | 66.0 | 75.3 | 72.1 | 58.7 | 61.5 |
| 46. | At-LBD39-Q9SZE8 | 51.0 | 66.3 | 64.6 | 62.1 | 54.5 | 46.8 | 53.3 | 67.9 | 71.7 | 71.1 | 59.6 | 60.8 |
| 47. | At-LBD40-Q9ZW96 | 61.7 | 56.7 | 55.4 | 54.9 | 49.1 | 41.0 | 49.6 | 55.8 | 55.9 | 55.4 | 50.6 | 51.5 |
| 48. | At-LBD41-Q9M886 | 66.9 | 50.6 | 49.8 | 48.7 | 50.5 | 45.5 | 49.3 | 52.1 | 48.7 | 51.3 | 49.0 | 47.1 |
| 49. | At-LBD42-Q9CA30 | 58.3 | 53.6 | 54.1 | 55.4 | 47.7 | 41.3 | 48.2 | 54.5 | 54.6 | 56.2 | 54.9 | 54.5 |

| | | 37 | 38 | 39 | 40 | 41 | 42 | 43 | 44 | 45 | 46 |
|---|---|---|---|---|---|---|---|---|---|---|---|
| 1. | Os-Os01g03890 | 44.0 | 39.2 | 34.8 | 35.5 | 44.4 | 34.9 | 40.5 | 31.9 | 33.3 | 32.4 |
| 2. | Os-Os01g32770 | 45.3 | 38.5 | 32.3 | 32.1 | 42.7 | 33.9 | 44.8 | 30.2 | 32.1 | 29.7 |
| 3. | Os-Os03g33090 | 34.7 | 36.9 | 32.7 | 53.0 | 36.4 | 54.9 | 35.1 | 50.0 | 51.2 | 49.6 |
| 4. | Os-Os03g41330 | 33.7 | 35.2 | 31.2 | 43.6 | 36.2 | 44.6 | 32.6 | 43.9 | 42.4 | 40.7 |
| 5. | Os-Os07g40000 | 32.8 | 35.7 | 31.9 | 49.8 | 32.6 | 51.3 | 33.1 | 49.2 | 47.4 | 48.1 |
| 6. | Nb-TC9404 | 33.8 | 37.3 | 32.6 | 58.6 | 32.5 | 61.1 | 35.1 | 56.9 | 54.0 | 56.3 |
| 7. | Gm-TC227562 | 32.8 | 36.4 | 32.4 | 76.6 | 34.7 | 74.9 | 37.1 | 56.2 | 57.8 | 57.3 |
| 8. | Gm-TC216138 | 31.6 | 36.7 | 31.6 | 74.3 | 36.0 | 74.0 | 34.9 | 53.9 | 55.0 | 54.1 |
| 9. | Hv-TC147776 | 31.1 | 38.2 | 33.5 | 50.6 | 34.3 | 50.6 | 34.5 | 49.2 | 48.6 | 45.8 |
| 10. | Sb-TC104758 | 33.1 | 35.2 | 31.3 | 48.7 | 33.7 | 50.2 | 33.1 | 50.6 | 48.2 | 46.7 |
| 11. | Aq-TC18561 | 33.4 | 36.2 | 32.5 | 56.7 | 36.0 | 57.8 | 36.0 | 51.6 | 55.6 | 57.1 |
| 12. | Vv-TC60668 | 33.4 | 39.7 | 34.3 | 65.3 | 33.7 | 66.8 | 36.0 | 54.2 | 57.4 | 58.8 |
| 13. | Lj-TC15459 | 32.1 | 35.9 | 31.0 | 70.4 | 32.8 | 70.7 | 35.3 | 52.8 | 53.0 | 54.8 |
| 14. | Gh-TC30552 | 33.7 | 38.6 | 33.7 | 66.2 | 35.2 | 69.0 | 32.9 | 62.4 | 63.5 | 58.7 |
| 15. | Ta-TC235711 | 45.3 | 42.7 | 36.2 | 35.4 | 46.0 | 38.3 | 46.6 | 34.1 | 35.9 | 33.7 |
| 16. | St-TC133081 | 55.7 | 45.6 | 37.3 | 36.5 | 55.8 | 37.2 | 54.9 | 37.1 | 35.8 | 36.5 |
| 17. | Mt-TC107091 | 63.7 | 43.0 | 37.3 | 34.2 | 54.3 | 33.9 | 60.6 | 33.4 | 37.2 | 34.2 |
| 18. | Hv-TC147808 | 45.0 | 41.9 | 34.3 | 34.3 | 45.2 | 37.4 | 46.8 | 32.4 | 35.4 | 32.8 |
| 19. | Vv-TC55931 | 52.0 | 51.4 | 40.9 | 36.8 | 49.8 | 38.7 | 48.9 | 37.4 | 34.9 | 36.7 |
| 20. | St-TC162239 | 41.6 | 45.1 | 39.7 | 36.3 | 41.8 | 36.0 | 42.9 | 35.4 | 35.7 | 35.0 |
| 21. | Pta-TC69225 | 37.6 | 33.4 | 29.4 | 33.4 | 34.7 | 32.3 | 38.0 | 31.7 | 31.1 | 32.5 |
| 22. | Pta-TC67269 | 38.8 | 36.8 | 31.2 | 30.4 | 35.7 | 31.2 | 38.1 | 31.3 | 32.3 | 31.3 |
| 23. | Gm-TC220806 | 48.7 | 48.8 | 40.1 | 39.7 | 48.1 | 37.9 | 51.3 | 36.5 | 38.0 | 38.4 |
| 24. | Ta-TC270332 | 31.8 | 33.3 | 29.3 | 42.5 | 32.5 | 44.2 | 32.4 | 41.5 | 40.4 | 43.7 |
| 25. | Aq-TC18329 | 61.1 | 48.3 | 40.6 | 33.4 | 51.2 | 36.6 | 55.9 | 35.1 | 32.8 | 34.4 |
| 26. | St-TC137193 | 34.1 | 37.3 | 35.7 | 60.9 | 33.0 | 60.0 | 34.4 | 57.3 | 55.7 | 54.1 |
| 27. | St-TC133385 | 34.0 | 37.3 | 36.4 | 60.1 | 34.5 | 59.6 | 33.8 | 56.5 | 54.9 | 53.1 |
| 28. | St-TC140088 | 33.3 | 36.9 | 33.5 | 53.0 | 31.4 | 51.9 | 31.9 | 48.8 | 47.0 | 49.6 |
| 29. | Pa-TC14656 | 32.1 | 33.3 | 33.2 | 41.1 | 29.3 | 41.7 | 32.8 | 39.0 | 40.0 | 39.9 |
| 30. | Pta-TC59178 | 34.0 | 30.3 | 28.3 | 37.4 | 32.8 | 38.4 | 30.2 | 36.5 | 35.7 | 37.6 |
| 31. | Pta-TC67974 | 33.2 | 34.2 | 34.1 | 42.2 | 31.9 | 41.9 | 34.2 | 40.9 | 42.6 | 40.4 |
| 32. | Le-TC178827 | 32.8 | 38.9 | 36.5 | 60.8 | 34.1 | 60.7 | 33.1 | 56.5 | 55.5 | 55.3 |
| 33. | Pt-III.589 | 34.7 | 37.9 | 33.5 | 67.1 | 35.5 | 65.7 | 32.7 | 64.1 | 63.9 | 57.5 |
| 34. | Pt-V.543 | 34.3 | 36.6 | 33.3 | 67.4 | 34.5 | 66.7 | 32.0 | 62.6 | 62.9 | 59.3 |
| 35. | Pt-XIV.94 | 31.8 | 35.8 | 30.4 | 49.4 | 36.0 | 51.7 | 37.1 | 45.0 | 45.3 | 46.5 |
| 36. | Pt-II105 | 32.4 | 35.0 | 30.4 | 48.5 | 36.7 | 51.1 | 35.6 | 43.6 | 45.7 | 48.1 |
| 37. | Pt-123.86 | | 45.8 | 39.3 | 33.1 | 56.2 | 34.3 | 55.9 | 34.8 | 34.1 | 33.0 |
| 38. | Pt-X180 | 56.4 | | 43.1 | 34.6 | 42.3 | 34.9 | 44.1 | 37.2 | 37.3 | 39.9 |
| 39. | Pt-XII.481 | 55.4 | 56.8 | | 32.5 | 37.5 | 33.6 | 37.4 | 31.9 | 30.5 | 29.9 |
| 40. | Ck-LOB-DQ787782 | 49.0 | 53.9 | 47.3 | | 35.5 | 80.9 | 33.8 | 54.0 | 55.8 | 57.8 |
| 41. | Bn-AAP37970 | 70.3 | 56.8 | 55.7 | 51.5 | | 37.7 | 51.6 | 33.2 | 34.1 | 34.3 |
| 42. | Mt-ABE82505 | 47.0 | 55.2 | 47.3 | 87.1 | 51.9 | | 36.7 | 55.6 | 57.3 | 56.7 |
| 43. | Mt-ABE78739 | 67.6 | 57.9 | 55.4 | 50.7 | 64.7 | 51.4 | | 31.9 | 32.7 | 34.3 |
| 44. | At-LBD37-Q9FN11 | 53.0 | 53.2 | 48.0 | 69.2 | 50.4 | 66.8 | 50.0 | | 76.9 | 55.3 |
| 45. | At-LBD38-Q9SN23 | 47.0 | 55.9 | 49.5 | 70.0 | 51.5 | 69.2 | 48.6 | 86.4 | | 56.8 |
| 46. | At-LBD39-Q9SZE8 | 49.0 | 57.3 | 49.1 | 72.5 | 53.8 | 71.3 | 51.1 | 67.2 | 68.8 | |
| 47. | At-LBD40-Q9ZW96 | 65.5 | 62.7 | 52.0 | 55.8 | 68.9 | 56.2 | 66.2 | 55.2 | 55.5 | 56.3 |
| 48. | At-LBD41-Q9M886 | 70.9 | 58.6 | 57.1 | 47.9 | 90.5 | 50.2 | 65.5 | 53.2 | 51.7 | 52.1 |
| 49. | At-LBD42-Q9CA30 | 55.4 | 62.7 | 52.0 | 58.4 | 56.8 | 55.8 | 57.2 | 53.6 | 52.6 | 52.9 |

| | | 47 | 48 | 49 |
|---|---|---|---|---|
| 1. | Os-Os01g03890 | 41.5 | 41.3 | 38.2 |
| 2. | Os-Os01g32770 | 41.5 | 44.8 | 39.0 |
| 3. | Os-Os03g33090 | 40.4 | 35.0 | 40.8 |
| 4. | Os-Os03g41330 | 38.2 | 33.7 | 36.0 |
| 5. | Os-Os07g40000 | 40.2 | 33.8 | 36.3 |
| 6. | Nb-TC9404 | 39.4 | 34.6 | 40.7 |
| 7. | Gm-TC227562 | 40.8 | 35.7 | 39.8 |
| 8. | Gm-TC216138 | 36.5 | 34.0 | 35.5 |
| 9. | Hv-TC147776 | 38.2 | 34.6 | 37.7 |
| 10. | Sb-TC104758 | 36.2 | 34.5 | 38.6 |
| 11. | Aq-TC18561 | 42.1 | 37.2 | 36.6 |
| 12. | Vv-TC60668 | 40.2 | 36.1 | 38.2 |
| 13. | Lj-TC15459 | 38.1 | 35.1 | 36.4 |
| 14. | Gh-TC30552 | 39.8 | 34.6 | 36.6 |
| 15. | Ta-TC235711 | 44.3 | 44.3 | 41.0 |
| 16. | St-TC133081 | 50.7 | 55.9 | 45.7 |
| 17. | Mt-TC107091 | 52.6 | 56.1 | 40.2 |
| 18. | Hv-TC147808 | 42.1 | 46.5 | 39.7 |
| 19. | Vv-TC55931 | 49.2 | 49.3 | 47.3 |
| 20. | St-TC162239 | 46.5 | 44.5 | 47.5 |
| 21. | Pta-TC69225 | 36.4 | 36.2 | 34.1 |
| 22. | Pta-TC67269 | 36.0 | 36.3 | 33.3 |
| 23. | Gm-TC220806 | 52.8 | 50.8 | 49.8 |
| 24. | Ta-TC270332 | 39.2 | 30.4 | 36.3 |
| 25. | Aq-TC18329 | 49.8 | 53.2 | 43.7 |
| 26. | St-TC137193 | 39.2 | 34.2 | 38.6 |
| 27. | St-TC133385 | 40.1 | 34.1 | 38.4 |
| 28. | St-TC140088 | 37.8 | 35.7 | 36.6 |
| 29. | Pa-TC14656 | 33.8 | 30.4 | 31.3 |
| 30. | Pta-TC59178 | 30.2 | 32.5 | 27.2 |
| 31. | Pta-TC67974 | 34.8 | 31.8 | 33.0 |
| 32. | Le-TC178827 | 39.0 | 34.6 | 38.5 |
| 33. | Pt-III.589 | 36.6 | 35.0 | 35.3 |
| 34. | Pt-V.543 | 38.2 | 35.4 | 39.2 |
| 35. | Pt-XIV.94 | 37.8 | 33.8 | 38.3 |
| 36. | Pt-II105 | 40.2 | 35.7 | 37.4 |
| 37. | Pt-123.86 | 53.8 | 59.1 | 43.6 |
| 38. | Pt-X180 | 46.8 | 41.5 | 49.6 |
| 39. | Pt-XII.481 | 38.5 | 37.6 | 36.4 |
| 40. | Ck-LOB-DQ787782 | 40.2 | 31.6 | 38.2 |
| 41. | Bn-AAP37970 | 55.5 | 83.5 | 42.1 |
| 42. | Mt-ABE82505 | 40.3 | 33.8 | 36.8 |
| 43. | Mt-ABE78739 | 53.3 | 51.6 | 43.8 |
| 44. | At-LBD37-Q9FN11 | 37.5 | 34.5 | 34.9 |
| 45. | At-LBD38-Q9SN23 | 40.5 | 33.5 | 34.8 |
| 46. | At-LBD39-Q9SZE8 | 38.3 | 35.0 | 37.1 |
| 47. | At-LBD40-Q9ZW96 | | 56.7 | 46.5 |
| 48. | At-LBD41-Q9M886 | 68.4 | | 42.6 |
| 49. | At-LBD42-Q9CA30 | 61.8 | 56.3 | |

### Example 4

### Identification of Domains Comprised in Polypeptide Sequences Useful in Performing the Methods of the Invention

[1106] The Integrated Resource of Protein Families, Domains and Sites (InterPro) database is an integrated interface for the commonly used signature databases for text- and sequence-based searches. The InterPro database combines these databases, which use different methodologies and varying degrees of biological information about well-characterized proteins to derive protein signatures. Collaborating databases include SWISS-PROT, PROSITE, TrEMBL, PRINTS, ProDom and Pfam, Smart and TIGRFAMs. Pfam is a large collection of multiple sequence alignments and hidden Markov models covering many common protein domains and families. Pfam is hosted at the Sanger Institute server in the United Kingdom. Interpro is hosted at the European Bioinformatics Institute in the United Kingdom.

[1107] The results of the InterPro scan of the polypeptide sequence as represented by SEQ ID NO: 2 are presented in Table A3.

TABLE A3
InterPro scan results (major accession numbers) of the
polypeptide sequence as represented by SEQ ID NO: 2.

| | Accession | Accession | Amino acid coordinates |
|---|---|---|---|
| Database | number | name | on SEQ ID NO 2 |
| PFAM | PF03195 | DUF260 | 2-107 |
| PROFILE | PS50891 | LOB | 1-107 |

### Example 5

### Topology Prediction of the Polypeptide Sequences Useful in Performing the Methods of the Invention

[1108] TargetP 1.1 predicts the subcellular location of eukaryotic proteins. The location assignment is based on the predicted presence of any of the N-terminal pre-sequences: chloroplast transit peptide (cTP), mitochondrial targeting peptide (mTP) or secretory pathway signal peptide (SP). Scores on which the final prediction is based are not really probabilities, and they do not necessarily add to one. However, the location with the highest score is the most likely according to TargetP, and the relationship between the scores (the reliability class) may be an indication of how certain the prediction is. The reliability class (RC) ranges from 1 to 5, where 1 indicates the strongest prediction. TargetP is maintained at the server of the Technical University of Denmark.

[1109] For the sequences predicted to contain an N-terminal presequence a potential cleavage site can also be predicted.

[1110] A number of parameters were selected, such as organism group (non-plant or plant), cutoff sets (none, predefined set of cutoffs, or user-specified set of cutoffs), and the calculation of prediction of cleavage sites (yes or no).

[1111] The results of TargetP 1.1 analysis of the polypeptide sequence as represented by SEQ ID NO: 2 are presented Table A4. The “plant” organism group has been selected, no cutoffs defined, and the predicted length of the transit peptide requested.

TABLE A4
TargetP 1.1 analysis of the polypeptide sequence
as represented by SEQ ID NO: 2

| | |
|---|---|
| Length (AA) | 250 |
| Chloroplastic transit peptide | 0.026 |
| Mitochondrial transit peptide | 0.401 |
| Secretory pathway signal peptide | 0.019 |
| Other subcellular targeting | 0.573 |
| Predicted Location | / |
| Reliability class | 5 |
| Predicted transit peptide length | / |

[1112] The subcellular localization of the polypeptide sequence as represented by SEQ ID NO: 2 may be the cytoplasm or nucleus, no transit peptide is predicted. SubLoc (Hua & Sun, Bioinformatics 17, 721-728, 2001) predicts a nuclear localisation (reliability index: 2, accuracy: 74%); this prediction is in agreement with the data from Liu et al (2005).

[1113] Many other algorithms can be used to perform such analyses, including:
[1114] ChloroP 1.1 hosted on the server of the Technical University of Denmark;
[1115] Protein Prowler Subcellular Localisation Predictor version 1.2 hosted on the server of the Institute for Molecular Bioscience, University of Queensland, Brisbane, Australia;
[1116] PENCE Proteome Analyst PA-GOSUB 2.5 hosted on the server of the University of Alberta, Edmonton, Alberta, Canada;
[1117] TMHMM, hosted on the server of the Technical University of Denmark

### Example 6

### Cloning of the LBD Nucleic Acid Sequence Used in the Methods of the Invention

[1118] The nucleic acid sequence used in the methods of the invention was amplified by PCR using as template a custom-made Arabidopsis thaliana seedlings cDNA library (in pCMV Sport 6.0; Invitrogen, Paisley, UK). PCR was performed using Hifi Taq DNA polymerase in standard conditions, using 200 ng of template in a 50 μl PCR mix. The primers used were prm009067 (SEQ ID NO: 3; sense, start codon in bold):

5′-ggggacaagtttgtacaaaaaagcaggcttaaacaatgagctgcaa
tggttgc-3′
and
prm009068 (SEQ ID NO: 4; reverse, complementary):
5′-ggggaccactttgtacaagaaagctgggtactaactctgagaaaac
cgcc-3′,

which include the AttB sites for Gateway recombination. The amplified PCR fragment was purified also using standard methods. The first step of the Gateway procedure, the BP reaction, was then performed, during which the PCR fragment recombines in vivo with the pDONR201 plasmid to produce, according to the Gateway terminology, an “entry clone”, pLBD. Plasmid pDONR201 was purchased from Invitrogen, as part of the Gateway® technology.

[1119] The entry clone comprising SEQ ID NO: 1 was then used in an LR reaction with a destination vector used for Oryza sativa transformation. This vector contained as functional elements within the T-DNA borders: a plant selectable marker; a screenable marker expression cassette; and a Gateway cassette intended for LR in vivo recombination with the nucleic acid sequence of interest already cloned in the entry clone. A rice GOS2 promoter (SEQ ID NO: 10) for root specific expression was located upstream of this Gateway cassette.

[1120] After the LR recombination step, the resulting expression vector pGOS2::LBD (FIG. 4) was transformed into Agrobacterium strain LBA4044 according to methods well known in the art.

### Example 7

### Plant Transformation

### Rice Transformation

[1121] The Agrobacterium containing the expression vector was used to transform Oryza sativa plants. Mature dry seeds of the rice japonica cultivar Nipponbare were dehusked. Sterilization was carried out by incubating for one minute in 70% ethanol, followed by 30 minutes in 0.2% HgCl₂, followed by a 6 times 15 minutes wash with sterile distilled water. The sterile seeds were then germinated on a medium containing 2,4-D (callus induction medium). After incubation in the dark for four weeks, embryogenic, scutellum-derived calli were excised and propagated on the same medium. After two weeks, the calli were multiplied or propagated by subculture on the same medium for another 2 weeks. Embryogenic callus pieces were sub-cultured on fresh medium 3 days before co-cultivation (to boost cell division activity).

[1122] Agrobacterium strain LBA4404 containing the expression vector was used for co-cultivation. Agrobacterium was inoculated on AB medium with the appropriate antibiotics and cultured for 3 days at 28° C. The bacteria were then collected and suspended in liquid co-cultivation medium to a density (OD₆₀₀) of about 1. The suspension was then transferred to a Petri dish and the calli immersed in the suspension for 15 minutes. The callus tissues were then blotted dry on a filter paper and transferred to solidified, co-cultivation medium and incubated for 3 days in the dark at 25° C. Co-cultivated calli were grown on 2,4-D-containing medium for 4 weeks in the dark at 28° C. in the presence of a selection agent. During this period, rapidly growing resistant callus islands developed. After transfer of this material to a regeneration medium and incubation in the light, the embryogenic potential was released and shoots developed in the next four to five weeks. Shoots were excised from the calli and incubated for 2 to 3 weeks on an auxin-containing medium from which they were transferred to soil. Hardened shoots were grown under high humidity and short days in a greenhouse.

[1123] Approximately 35 independent T0 rice transformants were generated for one construct. The primary transformants were transferred from a tissue culture chamber to a greenhouse. After a quantitative PCR analysis to verify copy number of the T-DNA insert, only single copy transgenic plants that exhibit tolerance to the selection agent were kept for harvest of T1 seed. Seeds were then harvested three to five months after transplanting. The method yielded single locus transformants at a rate of over 50% (Aldemita and Hodges1996, Chan et al. 1993, Hiei et al. 1994).

### Corn Transformation

[1124] Transformation of maize (Zea mays) is performed with a modification of the method described by Ishida et al. (1996) Nature Biotech 14(6): 745-50. Transformation is genotype-dependent in corn and only specific genotypes are amenable to transformation and regeneration. The inbred line A188 (University of Minnesota) or hybrids with A188 as a parent are good sources of donor material for transformation, but other genotypes can be used successfully as well. Ears are harvested from corn plant approximately 11 days after pollination (DAP) when the length of the immature embryo is about 1 to 1.2 mm. Immature embryos are cocultivated with Agrobacterium tumefaciens containing the expression vector, and transgenic plants are recovered through organogenesis. Excised embryos are grown on callus induction medium, then maize regeneration medium, containing the selection agent (for example imidazolinone but various selection markers can be used). The Petri plates are incubated in the light at 25° C. for 2-3 weeks, or until shoots develop. The green shoots are transferred from each embryo to maize rooting medium and incubated at 25° C. for 2-3 weeks, until roots develop. The rooted shoots are transplanted to soil in the greenhouse. T1 seeds are produced from plants that exhibit tolerance to the selection agent and that contain a single copy of the T-DNA insert.

### Wheat Transformation

[1125] Transformation of wheat is performed with the method described by Ishida et al. (1996) Nature Biotech 14(6): 745-50. The cultivar Bobwhite (available from CIMMYT, Mexico) is commonly used in transformation. Immature embryos are co-cultivated with Agrobacterium tumefaciens containing the expression vector, and transgenic plants are recovered through organogenesis. After incubation with Agrobacterium, the embryos are grown in vitro on callus induction medium, then regeneration medium, containing the selection agent (for example imidazolinone but various selection markers can be used). The Petri plates are incubated in the light at 25° C. for 2-3 weeks, or until shoots develop. The green shoots are transferred from each embryo to rooting medium and incubated at 25° C. for 2-3 weeks, until roots develop. The rooted shoots are transplanted to soil in the greenhouse. T1 seeds are produced from plants that exhibit tolerance to the selection agent and that contain a single copy of the T-DNA insert.

### Soybean Transformation

[1126] Soybean is transformed according to a modification of the method described in the Texas A&M patent U.S. Pat. No. 5,164,310. Several commercial soybean varieties are amenable to transformation by this method. The cultivar Jack (available from the Illinois Seed foundation) is commonly used for transformation. Soybean seeds are sterilised for in vitro sowing. The hypocotyl, the radicle and one cotyledon are excised from seven-day old young seedlings. The epicotyl and the remaining cotyledon are further grown to develop axillary nodes. These axillary nodes are excised and incubated with Agrobacterium tumefaciens containing the expression vector. After the cocultivation treatment, the explants are washed and transferred to selection media. Regenerated shoots are excised and placed on a shoot elongation medium. Shoots no longer than 1 cm are placed on rooting medium until roots develop. The rooted shoots are transplanted to soil in the greenhouse. T1 seeds are produced from plants that exhibit tolerance to the selection agent and that contain a single copy of the T-DNA insert.

### Rapeseed/Canola Transformation

[1127] Cotyledonary petioles and hypocotyls of 5-6 day old young seedling are used as explants for tissue culture and transformed according to Babic et al. (1998, Plant Cell Rep 17: 183-188). The commercial cultivar Westar (Agriculture Canada) is the standard variety used for transformation, but other varieties can also be used. Canola seeds are surface-sterilized for in vitro sowing. The cotyledon petiole explants with the cotyledon attached are excised from the in vitro seedlings, and inoculated with Agrobacterium (containing the expression vector) by dipping the cut end of the petiole explant into the bacterial suspension. The explants are then cultured for 2 days on MSBAP-3 medium containing 3 mg/l BAP, 3% sucrose, 0.7% Phytagar at 23° C., 16 hr light. After two days of co-cultivation with Agrobacterium, the petiole explants are transferred to MSBAP-3 medium containing 3 mg/l BAP, cefotaxime, carbenicillin, or timentin (300 mg/l) for 7 days, and then cultured on MSBAP-3 medium with cefotaxime, carbenicillin, or timentin and selection agent until shoot regeneration. When the shoots are 5-10 mm in length, they are cut and transferred to shoot elongation medium (MSBAP-0.5, containing 0.5 mg/l BAP). Shoots of about 2 cm in length are transferred to the rooting medium (MS0) for root induction. The rooted shoots are transplanted to soil in the greenhouse. T1 seeds are produced from plants that exhibit tolerance to the selection agent and that contain a single copy of the T-DNA insert.

### Alfalfa Transformation

[1128] A regenerating clone of alfalfa (Medicago sativa) is transformed using the method of (McKersie et al., 1999 Plant Physiol 119: 839-847). Regeneration and transformation of alfalfa is genotype dependent and therefore a regenerating plant is required. Methods to obtain regenerating plants have been described. For example, these can be selected from the cultivar Rangelander (Agriculture Canada) or any other commercial alfalfa variety as described by Brown D C W and A Atanassov (1985. Plant Cell Tissue Organ Culture 4: 111-112). Alternatively, the RA3 variety (University of Wisconsin) has been selected for use in tissue culture (Walker et al., 1978 Am J Bot 65:654-659). Petiole explants are cocultivated with an overnight culture of Agrobacterium tumefaciens C58C1 pMP90 (McKersie et al., 1999 Plant Physiol 119: 839-847) or LBA4404 containing the expression vector. The explants are cocultivated for 3 d in the dark on SH induction medium containing 288 mg/L Pro, 53 mg/L thioproline, 4.35 g/L K2SO4, and 100 μm acetosyringinone. The explants are washed in half-strength Murashige-Skoog medium (Murashige and Skoog, 1962) and plated on the same SH induction medium without acetosyringinone but with a suitable selection agent and suitable antibiotic to inhibit Agrobacterium growth. After several weeks, somatic embryos are transferred to BOi2Y development medium containing no growth regulators, no antibiotics, and 50 g/L sucrose. Somatic embryos are subsequently germinated on half-strength Murashige-Skoog medium. Rooted seedlings were transplanted into pots and grown in a greenhouse. T1 seeds are produced from plants that exhibit tolerance to the selection agent and that contain a single copy of the T-DNA insert.

### Cotton Transformation

[1129] Cotton (Gossypium hirsutum L.) transformation is performed using Agrobacterium tumefaciens, on hypocotyls explants. The commercial cultivars such as Coker 130 or Coker 312 (SeedCo, Lubbock, Tex.) are standard varieties used for transformation, but other varieties can also be used. The seeds are surface sterilized and germinated in the dark. Hypocotyl explants are cut from the germinated seedlings to lengths of about 1-1.5 centimeter. The hypotocyl explant is submersed in the Agrobacterium tumefaciens inoculum containing the expression vector, for 5 minutes then co-cultivated for about 48 hours on MS+1.8 mg/l KNO3+2% glucose at 24° C., in the dark. The explants are transferred the same medium containing appropriate bacterial and plant selectable markers (renewed several times), until embryogenic calli is seen. The calli are separated and subcultured until somatic embryos appear. Plantlets derived from the somatic embryos are matured on rooting medium until roots develop. The rooted shoots are transplanted to potting soil in the greenhouse. T1 seeds are produced from plants that exhibit tolerance to the selection agent and that contain a single copy of the T-DNA insert.

### Example 8

### Phenotypic Evaluation Procedure

### 8.1 Evaluation Setup

[1130] Approximately 35 independent T0 rice transformants were generated. The primary transformants were transferred from a tissue culture chamber to a greenhouse for growing and harvest of T1 seed. Six events, of which the T1 progeny segregated 3:1 for presence/absence of the transgene, were retained. For each of these events, approximately 10 T1 seedlings containing the transgene (hetero- and homo-zygotes) and approximately 10 T1 seedlings lacking the transgene (nullizygotes) were selected by monitoring visual marker expression. The transgenic plants and the corresponding nullizygotes were grown side-by-side at random positions. Greenhouse conditions were of shorts days (12 hours light), 28° C. in the light and 22° C. in the dark, and a relative humidity of 70%. Plants grown under non-stress conditions are supplied with water at regular intervals to ensure that water and nutrients are not limiting to satisfy plant needs to complete growth and development.

### Nitrogen Use Efficiency Screen

[1131] Rice plants from T2 seeds were grown in potting soil under normal conditions except for the nutrient solution. The pots were watered from transplantation to maturation with a specific nutrient solution containing reduced N nitrogen (N) content, usually between 7 to 8 times less. The rest of the cultivation (plant maturation, seed harvest) was the same as for plants not grown under abiotic stress. Growth and yield parameters are recorded as detailed for growth under normal conditions.

### 8.2 Statistical Analysis: F Test

[1132] A two factor ANOVA (analysis of variants) was used as a statistical model for the overall evaluation of plant phenotypic characteristics. An F test was carried out on all the parameters measured of all the plants of all the events transformed with the gene of the present invention. The F test was carried out to check for an effect of the gene over all the transformation events and to verify for an overall effect of the gene, also known as a global gene effect. The threshold for significance for a true global gene effect was set at a 5% probability level for the F test. A significant F test value points to a gene effect, meaning that it is not only the mere presence or position of the gene that is causing the differences in phenotype.

### 8.3 Parameters Measured

### Biomass-Related Parameter Measurement

[1133] From the stage of sowing until the stage of maturity the plants were passed several times through a digital imaging cabinet. At each time point digital images (2048×1536 pixels, 16 million colours) were taken of each plant from at least 6 different angles.

[1134] The plant aboveground area (or leafy biomass) was determined by counting the total number of pixels on the digital images from aboveground plant parts discriminated from the background. This value was averaged for the pictures taken on the same time point from the different angles and was converted to a physical surface value expressed in square mm by calibration. Experiments show that the aboveground plant area measured this way correlates with the biomass of plant parts above ground. The above ground area is the area measured at the time point at which the plant had reached its maximal leafy biomass. Early vigour was determined by counting the total number of pixels from aboveground plant parts discriminated from the background. This value was averaged for the pictures taken on the same time point from different angles and was converted to a physical surface value expressed in square mm by calibration. The results described below are for plants three weeks post-germination.

### Seed-Related Parameter Measurements

[1135] The mature primary panicles were harvested, counted, bagged, barcode-labelled and then dried for three days in an oven at 37° C. The panicles were then threshed and all the seeds were collected and counted. The filled husks were separated from the empty ones using an air-blowing device. The empty husks were discarded and the remaining fraction was counted again. The filled husks were weighed on an analytical balance. The number of filled seeds was determined by counting the number of filled husks that remained after the separation step. The total seed yield was measured by weighing all filled husks harvested from a plant. Total seed number per plant was measured by counting the number of husks harvested from a plant. Thousand Kernel Weight (TKW) is extrapolated from the number of filled seeds counted and their total weight. The Harvest Index (HI) in the present invention is defined as the ratio between the total seed yield and the above ground area (mm²), multiplied by a factor 10⁶. The seed fill rate as defined in the present invention is the proportion (expressed as a %) of the number of filled seeds over the total number of seeds (or florets).

### Example 9

### Results of the Phenotypic Evaluation of the Transgenic Plants Comprising SEQ ID NO: 1

[1136] The evaluation of transgenic rice plants expressing a LBD nucleic acid under non-stress conditions showed that there was an increase of more than 5% for aboveground biomass (AreaMax), total seed yield, number of filled seeds, fill rate, harvest index, and more than 3% for thousand kernel weight.

[1137] The evaluation of transgenic rice plants expressing a LBD nucleic acid in the nitrogen use efficiency screen revealed an increase of more than 5% for emergence vigour (early vigour).

### Example 10

### Results of the Phenotypic Evaluation of the Transgenic Plants Comprising SEQ ID NO: 71

[1138] The coding region comprised in SEQ ID NO: 71 was cloned under the control of the rice GOS2 promoter into a rice transformation vector as described in Example 6. Transgenic rice plants comprising the coding region of SEQ ID NO: 71 were generated following the procedures of Example 7. Plants were evaluated according to the procedure described in Example 8. SEQ ID NO: 71 encodes the LBD protein represented by SEQ ID NO: 25.

[1139] The evaluation of transgenic rice plants expressing SEQ ID NO: 71 under non-stress conditions showed that there was an increase of more than 5% for aboveground biomass (AreaMax), the number of flowers per panicle, the total number of seeds per plant, and more than 3% for thousand kernel weight.

### Example 11

### Results of the Phenotypic Evaluation of the Transgenic Plants Comprising SEQ ID NO: 72

[1140] The coding region comprised in SEQ ID NO: 72 was cloned under the control of the rice GOS2 promoter into a rice transformation vector as described in Example 6. Transgenic rice plants comprising the coding region of SEQ ID NO: 72 were generated following the procedures of Example 7. Plants were evaluated according to the procedure described in Example 8. SEQ ID NO: 72 encodes the LBD protein represented by SEQ ID NO: 52.

[1141] The evaluation of transgenic rice plants expressing SEQ ID NO: 72 under non-stress conditions showed that there was an increase of more than 5% for aboveground biomass (AreaMax), seed weight per plant, number of filled seeds, the number of flowers per panicle, the total number of seeds per plant, harvest index and more than 3% for thousand kernel weight.

[1142] The evaluation of transgenic rice plants expressing SEQ ID NO: 72 in the nitrogen use efficiency screen revealed an increase of more than 5% for the aboveground biomass (AreaMax).

### II. JMJC (JUMONJI-C) polypeptide

### Example 12

### Identification of Sequences Related to the JMJC Nucleic Acid Sequence Used in the Methods of the Invention

[1143] Sequences (full length cDNA, ESTs or genomic) related to the nucleic acid sequence used in the methods of the present invention were identified amongst those maintained in the Entrez Nucleotides database at the National Center for Biotechnology Information (NCBI) using database sequence search tools, such as the Basic Local Alignment Tool (BLAST) (Altschul et al. (1990) J. Mol. Biol. 215:403-410; and Altschul et al. (1997) Nucleic Acids Res. 25:3389-3402). The program is used to find regions of local similarity between sequences by comparing nucleic acid or polypeptide sequences to sequence databases and by calculating the statistical significance of matches. For example, the polypeptide encoded by the nucleic acid used in the present invention was used for the TBLASTN algorithm, with default settings and the filter to ignore low complexity sequences set off. The output of the analysis was viewed by pairwise comparison, and ranked according to the probability score (E-value), where the score reflect the probability that a particular alignment occurs by chance (the lower the E-value, the more significant the hit). In addition to E-values, comparisons were also scored by percentage identity. Percentage identity refers to the number of identical nucleotides (or amino acids) between the two compared nucleic acid (or polypeptide) sequences over a particular length.

[1144] Table B1 provides a list of nucleic acid sequences related to the JMJC nucleic acid sequence used in the methods of the present invention. Polypeptides with an accession extended by a dot and one digit represent splice variants.

TABLE B1
Examples of JMJC polypeptides

| | Genbank accession | Nucleic acid | Protein |
|---|---|---|---|
| Plant Source | (or locus) number | SEQ ID NO: | SEQ ID NO: |
| Arabidopsis thaliana | AT3G20810 | 73 | 74 |
| Arabidopsis thaliana | AT3G20810 | 83 | 84 |
| Arabidopsis thaliana | AT5G19840 | 85 | 86 |
| Arabidopsis thaliana | AT3G45880 | 87 | 88 |
| Medicago truncatula | ABE92082 | 89 | 90 |
| Brachypodium sylvaticum | CAJ26373 | 91 | 92 |
| Oryza sativa | Os09g0483600 | 93 | 94 |
| Arabidopsis thaliana | AT1G08620 | 95 | 96 |
| Arabidopsis thaliana | AT1G09060 | 97 | 98 |
| Arabidopsis thaliana | AT1G09060 | 99 | 100 |
| Arabidopsis thaliana | AT1G09060 | 101 | 102 |
| Arabidopsis thaliana | AT1G11950 | 103 | 104 |
| Arabidopsis thaliana | AT1G30810 | 105 | 106 |
| Arabidopsis thaliana | AT1G62310 | 107 | 108 |
| Arabidopsis thaliana | AT1G63490 | 109 | 110 |
| Arabidopsis thaliana | AT1G78280 | 111 | 112 |
| Arabidopsis thaliana | AT2G34880 | 113 | 114 |
| Arabidopsis thaliana | AT2G38950 | 115 | 116 |
| Arabidopsis thaliana | AT3G07610 | 117 | 118 |
| Arabidopsis thaliana | AT3G48430 | 119 | 120 |
| Arabidopsis thaliana | AT4G00990 | 121 | 122 |
| Arabidopsis thaliana | AT4G20400 | 123 | 124 |
| Arabidopsis thaliana | AT4G20400 | 125 | 126 |
| Arabidopsis thaliana | AT5G04240 | 127 | 128 |
| Arabidopsis thaliana | AT5G06550 | 129 | 130 |
| Arabidopsis thaliana | AT5G46910 | 131 | 132 |
| Arabidopsis thaliana | AT5G63080 | 133 | 134 |
| Oryza sativa | Os01g36630 | 135 | 136 |
| Oryza sativa | Os01g67970 | 137 | 138 |
| Oryza sativa | Os02g01940 | 139 | 140 |
| Oryza sativa | Os02g58210 | 141 | 142 |
| Oryza sativa | Os02g58210 | 143 | 144 |
| Oryza sativa | Os03g05680 | 145 | 146 |
| Oryza sativa | Os03g22540 | 147 | 148 |
| Oryza sativa | Os03g27250 | 149 | 150 |
| Oryza sativa | Os03g31594 | 151 | 152 |
| Oryza sativa | Os03g31594 | 153 | 154 |
| Oryza sativa | Os05g 10770 | 155 | 156 |
| Oryza sativa | Os05g23670 | 157 | 158 |
| Oryza sativa | Os09g22540 | 159 | 160 |
| Oryza sativa | Os10g42690 | 161 | 162 |
| Oryza sativa | Os11g36450 | 163 | 164 |
| Oryza sativa | Os12g18149 | 165 | 166 |
| Oryza sativa | Os12g18150 | 167 | 168 |
| Glycine max | Gm_JMJ_1 | 169 | 170 |

[1145] In some instances, related sequences have tentatively been assembled and publicly disclosed by research institutions, such as The Institute for Genomic Research (TIGR). The Eukaryotic Gene Orthologs (EGO) database may be used to identify such related sequences, either by keyword search or by using the BLAST algorithm with the nucleic acid or polypeptide sequence of interest.

### Example 13

### Alignment of JMJC Polypeptide Sequences

[1146] Alignment of polypeptide sequences was performed using the AlignX programme from the Vector NTI (Invitrogen) which is based on the popular Clustal W algorithm of progressive alignment (Thompson et al. (1997) Nucleic Acids Res 25:4876-4882; Chenna et al. (2003). Nucleic Acids Res 31:3497-3500). Default values are for the gap open penalty of 10, for the gap extension penalty of 0.1 and the selected weight matrix is Blosum 62 (if polypeptides are aligned). Minor manual editing may be done to further optimise the alignment. Sequence conservation among JMJC polypeptides is mostly in the JmjC domain of the polypeptides. The region corresponding to the motifs represented by SEQ ID NO: 79 and by SEQ ID NO: 81 is more conserved than that of motif 8. A consensus sequence is given. Amino acid residues in the consensus sequences are highly conserved. Blanks in the conserved sequences represent any amino acid. The JMJC polypeptides are aligned in FIG. 7.

### Example 14

### Calculation of Global Percentage Identity Between JMJC Polypeptide Sequences Useful in Performing the Methods of the Invention

[1147] Global percentages of similarity and identity between full length polypeptide sequences useful in performing the methods of the invention were determined using one of the methods available in the art, the MatGAT (Matrix Global Alignment Tool) software (BMC Bioinformatics. 2003 4:29. MatGAT: an application that generates similarity/identity matrices using protein or DNA sequences. Campanella J J, Bitincka L, Smalley J; software hosted by Ledion Bitincka). MatGAT software generates similarity/identity matrices for DNA or protein sequences without needing pre-alignment of the data. The program performs a series of pair-wise alignments using the Myers and Miller global alignment algorithm (with a gap opening penalty of 12, and a gap extension penalty of 2), calculates similarity and identity using for example Blosum 62 (for polypeptides), and then places the results in a distance matrix. Sequence similarity is shown in the bottom half of the dividing line and sequence identity is shown in the top half of the diagonal dividing line.

[1148] Parameters used in the comparison were:
[1149] Scoring matrix: Blosum62
[1150] First Gap: 12
[1151] Extending gap: 2

[1152] Results of the software analysis are shown in Table B2 for the global similarity and identity over the full length of the polypeptide sequences. Percentage identity is given above the diagonal in bold and percentage similarity is given below the diagonal (normal face).

[1153] The percentage identity between the JMJC polypeptide sequences useful in performing the methods of the invention can be as low as 15% amino acid identity compared to SEQ ID NO: 74.

TABLE B2
MatGAT results for global similarity and identity over the full length of the
polypeptide sequences.

| | | SEQ ID | SEQ ID | SEQ ID | SEQ ID | SEQ ID | SEQ ID | SEQ ID |
|---|---|---|---|---|---|---|---|---|
| | | NO: 74 | NO: 84 | NO: 86 | NO: 90 | NO: 92 | NO: 94 | NO: 136 |
| AT3G20810.1 | SEQ ID NO: 74 | | 97.4 | 16.1 | 15.5 | 16.9 | 17.3 | 15.5 |
| AT3G20810.2 | SEQ ID NO: 84 | 97.4 | | 15.5 | 14.5 | 17.5 | 17.1 | 14.9 |
| AT5G19840 | SEQ ID NO: 86 | 30.3 | 30.7 | | 16.9 | 17 | 16.9 | 16.9 |
| ABE92082 | SEQ ID NO: 90 | 28.2 | 27.7 | 28.5 | | 51.8 | 51.7 | 17.3 |
| CAJ26373 | SEQ ID NO: 92 | 30.1 | 29.6 | 27.7 | 67.6 | | 82.5 | 12.4 |
| Os09g0483600 | SEQ ID NO: 94 | 30.1 | 30.1 | 27.5 | 67.3 | 89.6 | | 16.1 |
| Os01g36630 | SEQ ID NO: 136 | 33.7 | 31.2 | 32.9 | 34.2 | 29.1 | 29.6 | |

### Example 15

### Identification of Domains Comprised in JMJC Polypeptide Sequences Useful in Performing the Methods of the Invention

[1154] The Integrated Resource of Protein Families, Domains and Sites (InterPro) database is an integrated interface for the commonly used signature databases for text- and sequence-based searches. The InterPro database combines these databases, which use different methodologies and varying degrees of biological information about well-characterized proteins to derive protein signatures. Collaborating databases include SWISS-PROT, PROSITE, TrEMBL, PRINTS, ProDom and Pfam, Smart and TIGRFAMs. Pfam is a large collection of multiple sequence alignments and hidden Markov models covering many common protein domains and families. Pfam is hosted at the Sanger Institute server in the United Kingdom. Interpro is hosted at the European Bioinformatics Institute in the United Kingdom. Table B3 shows the settings (Gathering cut off, trusted cut off and noise cut off) as described in the Pfam database that were used to produce the HMMs_fs for the different domains.

TABLE B3
HMMs_fs settings.

| Domain | Gathering cutoff | Trusted cutoff | Noise cutoff |
|---|---|---|---|
| PF02373 | 16 | 16.1 | 15.9 |
| PF02375 | 15 | 16.8 | 13.8 |
| PF02928 | 25 | 44.4 | 21.1 |
| PF00646 | 17.7 | 17.7 | 17.6 |
| PF00096 | 22.5 | 22.5 | 22.4 |
| PF04967 | 15.4 | 15.4 | 3 |

[1155] The results of the Pfam scan for representative JMJC polypeptides of plant origin are presented in Table B4. The amino acid coordinates for each domain in the sequence of reference is indicated in the columns Start and End. The E-value of the alignment is also given. The InterPro ID accession number of each domain identified is also provided.

TABLE B4
Pfam scan results (major accession numbers) of representative JMJC polypeptides
of plant origin.

| | Genbank (genomic | | | | | | | |
|---|---|---|---|---|---|---|---|---|
| Protein | locus) accession | | | | | | | InterPro |
| SEQ ID NO: | number (name) | Database | Entry | E_value | Start | End | InterPro ID | Description |
| 96 | AT1G08620 | Pfam | PF02373 | 1.10E−62 | 368 | 484 | IPR003347 | Transcription |
| | | | | | | | | factor jumonji, |
| | | | | | | | | jmjC |
| 96 | AT1G08620 | Pfam | PF02375 | 1.50E−16 | 127 | 165 | IPR003349 | Transcription |
| | | | | | | | | factor jumonji, |
| | | | | | | | | JmjN |
| 96 | AT1G08620 | Pfam | PF02928 | 9.10E−22 | 591 | 644 | IPR004198 | Zn-finger, |
| | | | | | | | | C5HC2 type |
| 96 | AT1G08620 | SMART | SM00541 | 1.10E−17 | 962 | 1006 | IPR003888 | FY-rich domain, |
| | | | | | | | | N-terminal |
| 96 | AT1G08620 | SMART | SM00542 | 1.30E−43 | 1012 | 1106 | IPR003889 | FY-rich domain, |
| | | | | | | | | C-terminal |
| 98 | AT1G09060 | Pfam | PF02373 | 6.80E−06 | 644 | 856 | IPR003347 | Transcription |
| | | | | | | | | factor jumonji, |
| | | | | | | | | jmjC |
| 104 | AT1G11950 | Pfam | PF02373 | 1.00E−23 | 645 | 825 | IPR003347 | Transcription |
| | | | | | | | | factor jumonji, |
| | | | | | | | | jmjC |
| 106 | AT1G30810 | Pfam | PF02373 | 5.00E−30 | 294 | 378 | IPR003347 | Transcription |
| | | | | | | | | factor jumonji, |
| | | | | | | | | jmjC |
| 106 | AT1G30810 | Pfam | PF02375 | 3.10E−24 | 58 | 104 | IPR003349 | Transcription |
| | | | | | | | | factor jumonji, |
| | | | | | | | | JmjN |
| 106 | AT1G30810 | Pfam | PF02928 | 4.50E−30 | 487 | 540 | IPR004198 | Zn-finger, |
| | | | | | | | | C5HC2 type |
| 106 | AT1G30810 | SMART | SM00541 | 1.30E−17 | 626 | 670 | IPR003888 | FY-rich domain, |
| | | | | | | | | N-terminal |
| 106 | AT1G30810 | SMART | SM00542 | 1.20E−39 | 676 | 762 | IPR003889 | FY-rich domain, |
| | | | | | | | | C-terminal |
| 108 | AT1G62310 | Pfam | PF02373 | 2.00E−27 | 733 | 846 | IPR003347 | Transcription |
| | | | | | | | | factor jumonji, |
| | | | | | | | | jmjC |
| 108 | AT1G62310 | ProSite | PS50089 | 10.173 | 209 | 256 | IPR001841 | Zn-finger, RING |
| 110 | AT1G63490 | Pfam | PF00628 | 5.40E−08 | 1009 | 1053 | IPR001965 | Zn-finger-like, |
| | | | | | | | | PHD finger |
| 110 | AT1G63490 | Pfam | PF02373 | 3.10E−60 | 66 | 182 | IPR003347 | Transcription |
| | | | | | | | | factor jumonji, |
| | | | | | | | | jmjC |
| 110 | AT1G63490 | Pfam | PF02928 | 4.80E−33 | 276 | 329 | IPR004198 | Zn-finger, |
| | | | | | | | | C5HC2 type |
| 112 | AT1G78280 | Pfam | PF00646 | 0.00012 | 15 | 62 | IPR001810 | Cyclin-like F- |
| | | | | | | | | box |
| 112 | AT1G78280 | Pfam | PF02373 | 4.10E−12 | 249 | 362 | IPR003347 | Transcription |
| | | | | | | | | factor jumonji, |
| | | | | | | | | jmjC |
| 112 | AT1G78280 | ProSite | PS50181 | 9.603 | 14 | 60 | IPR001810 | Cyclin-like F- |
| | | | | | | | | box |
| 114 | AT2G34880 | Pfam | PF02373 | 1.50E−67 | 294 | 410 | IPR003347 | Transcription |
| | | | | | | | | factor jumonji, |
| | | | | | | | | jmjC |
| 114 | AT2G34880 | Pfam | PF02375 | 3.70E−29 | 60 | 106 | IPR003349 | Transcription |
| | | | | | | | | factor jumonji, |
| | | | | | | | | JmjN |
| 114 | AT2G34880 | Pfam | PF02928 | 1.40E−23 | 514 | 567 | IPR004198 | Zn-finger, |
| | | | | | | | | C5HC2 type |
| 114 | AT2G34880 | SMART | SM00541 | 9.90E−17 | 643 | 687 | IPR003888 | FY-rich domain, |
| | | | | | | | | N-terminal |
| 114 | AT2G34880 | SMART | SM00542 | 4.60E−39 | 693 | 781 | IPR003889 | FY-rich domain, |
| | | | | | | | | C-terminal |
| 116 | AT2G38950 | Pfam | PF02373 | 4.60E−47 | 321 | 437 | IPR003347 | Transcription |
| | | | | | | | | factor jumonji, |
| | | | | | | | | jmjC |
| 116 | AT2G38950 | Pfam | PF02375 | 9.30E−28 | 107 | 153 | IPR003349 | Transcription |
| | | | | | | | | factor jumonji, |
| | | | | | | | | JmjN |
| 116 | AT2G38950 | Pfam | PF02928 | 5.90E−27 | 544 | 597 | IPR004198 | Zn-finger, |
| | | | | | | | | C5HC2 type |
| 118 | AT3G07610 | Pfam | PF02373 | 3.40E−15 | 726 | 843 | IPR003347 | Transcription |
| | | | | | | | | factor jumonji, |
| | | | | | | | | jmjC |
| 120 | AT3G48430 | Pfam | PF00096 | 0.014 | 1243 | 1268 | IPR007087 | Zn-finger, C2H2 |
| | | | | | | | | type |
| 120 | AT3G48430 | Pfam | PF00096 | 0.0022 | 1296 | 1320 | IPR007087 | Zn-finger, C2H2 |
| | | | | | | | | type |
| 120 | AT3G48430 | Pfam | PF00096 | 0.00026 | 1326 | 1352 | IPR007087 | Zn-finger, C2H2 |
| | | | | | | | | type |
| 120 | AT3G48430 | Pfam | PF02373 | 9.00E−52 | 233 | 352 | IPR003347 | Transcription |
| | | | | | | | | factor jumonji, |
| | | | | | | | | jmjC |
| 120 | AT3G48430 | Pfam | PF02375 | 1.30E−07 | 19 | 62 | IPR003349 | Transcription |
| | | | | | | | | factor jumonji, |
| | | | | | | | | JmjN |
| 120 | AT3G48430 | ProSite | PS00028 | 0.00008 | 1268 | 1290 | IPR007087 | Zn-finger, C2H2 |
| | | | | | | | | type |
| 122 | AT4G00990 | Pfam | PF02373 | 2.80E−16 | 607 | 781 | IPR003347 | Transcription |
| | | | | | | | | factor jumonji, |
| | | | | | | | | jmjC |
| 124 | AT4G20400 | Pfam | PF02373 | 4.60E−68 | 239 | 355 | IPR003347 | Transcription |
| | | | | | | | | factor jumonji, |
| | | | | | | | | jmjC |
| 124 | AT4G20400 | Pfam | PF02375 | 9.60E−11 | 7 | 44 | IPR003349 | Transcription |
| | | | | | | | | factor jumonji, |
| | | | | | | | | JmjN |
| 124 | AT4G20400 | Pfam | PF02928 | 5.70E−30 | 462 | 515 | IPR004198 | Zn-finger, |
| | | | | | | | | C5HC2 type |
| 124 | AT4G20400 | SMART | SM00541 | 4.40E−15 | 683 | 727 | IPR003888 | FY-rich domain, |
| | | | | | | | | N-terminal |
| 124 | AT4G20400 | SMART | SM00542 | 7.40E−41 | 733 | 830 | IPR003889 | FY-rich domain, |
| | | | | | | | | C-terminal |
| 128 | AT5G04240 | Pfam | PF00096 | 0.41 | 1228 | 1253 | IPR007087 | Zn-finger, C2H2 |
| | | | | | | | | type |
| 128 | AT5G04240 | Pfam | PF00096 | 0.0028 | 1281 | 1305 | IPR007087 | Zn-finger, C2H2 |
| | | | | | | | | type |
| 128 | AT5G04240 | Pfam | PF00096 | 0.0016 | 1311 | 1337 | IPR007087 | Zn-finger, C2H2 |
| | | | | | | | | type |
| 128 | AT5G04240 | Pfam | PF02373 | 1.10E−48 | 292 | 411 | IPR003347 | Transcription |
| | | | | | | | | factor jumonji, |
| | | | | | | | | jmjC |
| 128 | AT5G04240 | Pfam | PF02375 | 1.00E−09 | 15 | 58 | IPR003349 | Transcription |
| | | | | | | | | factor jumonji, |
| | | | | | | | | JmjN |
| 130 | AT5G06550 | Pfam | PF00646 | 0.0013 | 81 | 128 | IPR001810 | Cyclin-like F- |
| | | | | | | | | box |
| 130 | AT5G06550 | Pfam | PF02373 | 3.20E−07 | 311 | 422 | IPR003347 | Transcription |
| | | | | | | | | factor jumonji, |
| | | | | | | | | jmjC |
| 130 | AT5G46910 | Pfam | PF02373 | 1.00E−49 | 199 | 322 | IPR003347 | Transcription |
| | | | | | | | | factor jumonji, |
| | | | | | | | | jmjC |
| 132 | AT5G46910 | Pfam | PF02375 | 2.90E−09 | 21 | 62 | IPR003349 | Transcription |
| | | | | | | | | factor jumonji, |
| | | | | | | | | JmjN |
| 134 | AT5G63080 | Pfam | PF02373 | 3.90E−16 | 164 | 270 | IPR003347 | Transcription |
| | | | | | | | | factor jumonji, |
| | | | | | | | | jmjC |
| 74 | AT3G20810 | Pfam | PF02373 | 0.00013 | 378 | 409 | IPR003347 | Transcription |
| | | | | | | | | factor jumonji, |
| | | | | | | | | jmjC |
| 84 | AT5G19840 | Pfam | PF02373 | 0.036 | 173 | 281 | IPR003347 | Transcription |
| | | | | | | | | factor jumonji, |
| | | | | | | | | jmjC |
| 86 | AT5G19840 | Pfam | PF04967 | 0.47 | 295 | 307 | IPR007050 | HTH DNA |
| | | | | | | | | binding domain |
| 170 | Gm_JMJ_1 | Pfam | PF02373.11 | 9.70E−06 | 297 | 404 | IPR003347 | JmjC domain |

### Example 16

### Cloning of the JMJC Nucleic Acid Sequence Used in the Methods of the Invention

[1156] The nucleic acid sequence used in the methods of the invention was amplified by PCR using as template a custom-made Arabidopsis thaliana seedlings cDNA library (in pCMV Sport 6.0; Invitrogen, Paisley, UK). PCR was performed using Hifi Taq DNA polymerase in standard conditions, using 200 ng of template in a 50 μl PCR mix. An uspstream and downstream primer as represented by SEQ ID NO: 75 and SEQ ID NO: 76 respectively were used to amplify by PCR (Polymerase Chain Reaction) the coding region of JMJC as represented by SEQ ID NO: 73. The primers include the AttB sites for Gateway recombination to facilitate the cloning of the amplified PCR DNA fragment into a Gateway cloning vector.

[1157] The amplified PCR fragment was purified also using standard methods. The first step of the Gateway procedure, the BP reaction, was then performed, during which the PCR fragment recombines in vivo with the pDONR201 plasmid to produce, according to the Gateway terminology, an “entry clone”, pJMJC. Plasmid pDONR201 was purchased from Invitrogen, as part of the Gateway® technology.

[1158] The entry clone comprising SEQ ID NO: 73 was then used in an LR reaction with a destination vector used for Oryza sativa transformation. This vector contained as functional elements within the T-DNA borders: a plant selectable marker; a screenable marker expression cassette; and a Gateway cassette intended for LR in vivo recombination with the nucleic acid sequence of interest already cloned in the entry clone. A rice GOS2 promoter (SEQ ID NO: 77) for constitutive expression was located upstream of this Gateway cassette.

[1159] After the LR recombination step, the resulting expression vector pGOS2::JMJC (FIG. 9) was transformed into Agrobacterium strain LBA4044 according to methods well known in the art.

### Example 17

### Plant Transformation

[1160] Transformation of plants was carried out according to the procedure outlined in Example 7

### Example 18

### Phenotypic Evaluation Procedure

### 18.1 Evaluation Setup

[1161] Approximately 35 independent T0 rice transformants were generated. The primary transformants were transferred from a tissue culture chamber to a greenhouse for growing and harvest of T1 seed. Eight events, of which the T1 progeny segregated 3:1 for presence/absence of the transgene, were retained. For each of these events, approximately 10 T1 seedlings containing the transgene (hetero- and homo-zygotes) and approximately 10 T1 seedlings lacking the transgene (nullizygotes) were selected by monitoring visual marker expression. The transgenic plants and the corresponding nullizygotes were grown side-by-side at random positions. Greenhouse conditions were of shorts days (12 hours light), 28° C. in the light and 22° C. in the dark, and a relative humidity of 70%. Plants grown under non-stress conditions are supplied with water at regular intervals to ensure that water and nutrients are not limiting to satisfy plant needs to complete growth and development.

[1162] Four T1 events were further evaluated in the T2 generation following the same evaluation procedure as for the T1 generation but with more individuals per event. From the stage of sowing until the stage of maturity the plants were passed several times through a digital imaging cabinet. At each time point digital images (2048×1536 pixels, 16 million colours) were taken of each plant from at least 6 different angles.

### Drought Screen

[1163] Plants from T2 seeds were grown in potting soil under normal conditions until they approached the heading stage. They were then transferred to a “dry” section where irrigation was withheld. Humidity probes were inserted in randomly chosen pots to monitor the soil water content (SWC). When SWC went below certain thresholds, the plants were automatically re-watered continuously until a normal level was reached again. The plants were then re-transferred again to normal conditions. The rest of the cultivation (plant maturation, seed harvest) was the same as for plants not grown under abiotic stress conditions. Growth and yield parameters are recorded as detailed for growth under normal conditions.

### Nitrogen Use Efficiency Screen

[1164] Rice plants from T2 seeds are grown in potting soil under normal conditions except for the nutrient solution. The pots are watered from transplantation to maturation with a specific nutrient solution containing reduced N nitrogen (N) content, usually between 7 to 8 times less. The rest of the cultivation (plant maturation, seed harvest) is the same as for plants not grown under abiotic stress. Growth and yield parameters are recorded as detailed for growth under normal conditions.

### 18.2 Statistical Analysis: F Test

[1165] A two factor ANOVA (analysis of variants) was used as a statistical model for the overall evaluation of plant phenotypic characteristics. An F test was carried out on all the parameters measured of all the plants of all the events transformed with the gene of the present invention. The F test was carried out to check for an effect of the gene over all the transformation events and to verify for an overall effect of the gene, also known as a global gene effect. The threshold for significance for a true global gene effect was set at a 5% probability level for the F test. A significant F test value points to a gene effect, meaning that it is not only the mere presence or position of the gene that is causing the differences in phenotype.

[1166] Because two experiments with overlapping events were carried out, a combined analysis was performed. This is useful to check consistency of the effects over the two experiments, and if this is the case, to accumulate evidence from both experiments in order to increase confidence in the conclusion. The method used was a mixed-model approach that takes into account the multilevel structure of the data (i.e. experiment-event-segregants). P values were obtained by comparing likelihood ratio test to chi square distributions.

### 18.3 Parameters Measured

### Biomass-Related Parameter Measurement

[1167] From the stage of sowing until the stage of maturity the plants were passed several times through a digital imaging cabinet. At each time digital images (2048×1536 pixels, 16 million colours) were taken of each plant from at least 6 different angles.

[1168] The plant aboveground area (or leafy biomass) was determined by counting the total number of pixels on the digital images from aboveground plant parts discriminated from the background. This value was averaged for the pictures taken on the same time point from the different angles and was converted to a physical surface value expressed in square mm by calibration. Experiments show that the aboveground plant area measured this way correlates with the biomass of plant parts above ground. The above ground area is the area measured at the time point at which the plant had reached its maximal leafy biomass. The early vigour is the plant (seedling) aboveground area three weeks post-germination. Increase in root biomass is expressed as an increase in total root biomass (measured as maximum biomass of roots observed during the lifespan of a plant); or as an increase in the root/shoot index (measured as the ratio between root mass and shoot mass in the period of active growth of root and shoot).

[1169] Early vigour was determined by counting the total number of pixels from aboveground plant parts discriminated from the background. This value was averaged for the pictures taken on the same time from different angles and was converted to a physical surface value expressed in square mm by calibration. The results described below are for plants three weeks post-germination.

### Seed-Related Parameter Measurements

[1170] The mature primary panicles were harvested, counted, bagged, barcode-labelled and then dried for three days in an oven at 37° C. The panicles were then threshed and all the seeds were collected and counted. The filled husks were separated from the empty ones using an air-blowing device. The empty husks were discarded and the remaining fraction was counted again. The filled husks were weighed on an analytical balance. The number of filled seeds was determined by counting the number of filled husks that remained after the separation step. The total seed yield was measured by weighing all filled husks harvested from a plant. Total seed number per plant was measured by counting the number of husks harvested from a plant. Thousand Kernel Weight (TKW) is extrapolated from the number of filled seeds counted and their total weight. The Harvest Index (HI) in the present invention is defined as the ratio between the total seed yield and the above ground area (mm²), multiplied by a factor 10⁶. The total number of flowers per panicle as defined in the present invention is the ratio between the total number of seeds and the number of mature primary panicles. The seed fill rate as defined in the present invention is the proportion (expressed as a %) of the number of filled seeds over the total number of seeds (or florets).

### Example 19

### Results of the Phenotypic Evaluation of the Transgenic Plants

[1171] The results of the evaluation of transgenic rice plants expressing the JMJC nucleic acid as represented by SEQ ID NO: 73 under non-stress conditions are presented below. An increase of at least 5% was observed for emergence vigour (early vigour), root/shoot index, total seed yield, harvest index, and of at least 3% for thousand kernel weight in the transgenic plants of when compared to the control nullizygote plants.

[1172] The results of the evaluation of transgenic rice plants expressing SEQ ID NO: 73 under drought-stress conditions are presented hereunder. An increase of at least 5% was observed for root/shoot index, total seed weight, number of filled seeds, fill rate, harvest index and of at least 3% for thousand kernel weight in the transgenic plants of when compared to the control nullizygote plants.

### III. Casein Kinase I

### Example 20

### Identification of Sequences Related to the CKI Nucleic Acid Sequence Used in the Methods of the Invention

[1173] Sequences (full length cDNA, ESTs or genomic) related to the nucleic acid sequence used in the methods of the present invention are identified amongst those maintained in the Entrez Nucleotides database at the National Center for Biotechnology Information (NCBI) using database sequence search tools, such as the Basic Local Alignment Tool (BLAST) (Altschul et al. (1990) J. Mol. Biol. 215:403-410; and Altschul et al. (1997) Nucleic Acids Res. 25:3389-3402). The program is used to find regions of local similarity between sequences by comparing nucleic acid or polypeptide sequences to sequence databases and by calculating the statistical significance of matches. For example, the polypeptide encoded by the nucleic acids used in the present invention are used for the TBLASTN algorithm, with default settings and the filter to ignore low complexity sequences set off. The output of the analysis is viewed by pairwise comparison, and ranked according to the probability score (E-value), where the score reflects the probability that a particular alignment occurs by chance (the lower the E-value, the more significant the hit). In addition to E-values, comparisons are also scored by percentage identity. Percentage identity refers to the number of identical nucleotides (or amino acids) between the two compared nucleic acid (or polypeptide) sequences over a particular length. In some instances, the default parameters may be adjusted to modify the stringency of the search. For example the E-value may be increased to show less stringent matches. This way, short nearly exact matches may be identified.

[1174] In some instances, related sequences may tentatively be assembled and publicly disclosed by research institutions, such as The Institute for Genomic Research (TIGR). The Eukaryotic Gene Orthologs (EGO) database may be used to identify such related sequences, either by keyword search or by using the BLAST algorithm with the nucleic acid or polypeptide sequence of interest.

### Example 21

### Alignment of GRP Polypeptide Sequences

[1175] Alignment of polypeptide sequences is performed using the AlignX programme from the Vector NTI package (Invitrogen) which is based on the popular Clustal W algorithm of progressive alignment (Thompson et al. (1997) Nucleic Acids Res 25:4876-4882; Chenna et al. (2003). Nucleic Acids Res 31:3497-3500). Default values are for the gap open penalty of 10, for the gap extension penalty of 0.1 and the selected weight matrix is Blosum 62 (if polypeptides are aligned). Minor manual editing may be done to further optimise the alignment.

[1176] A phylogenetic tree of GRP polypeptides is constructed using a neighbour-joining clustering algorithm as provided in the AlignX programme from Vector NTI (Invitrogen).

### Example 22

### Calculation of Global Percentage Identity Between Polypeptide Sequences Useful in Performing the Methods of the Invention

[1177] Global percentages of similarity and identity between full length polypeptide sequences useful in performing the methods of the invention are determined using one of the methods available in the art, the MatGAT (Matrix Global Alignment Tool) software (BMC Bioinformatics. 2003 4:29. MatGAT: an application that generates similarity/identity matrices using protein or DNA sequences. Campanella J J, Bitincka L, Smalley J; software hosted by Ledion Bitincka). MatGAT software generates similarity/identity matrices for DNA or protein sequences without needing pre-alignment of the data. The program performs a series of pair-wise alignments using the Myers and Miller global alignment algorithm (with a gap opening penalty of 12, and a gap extension penalty of 2), calculates similarity and identity using for example Blosum 62 (for polypeptides), and then places the results in a distance matrix. Sequence similarity is shown in the bottom half of the dividing line and sequence identity is shown in the top half of the diagonal dividing line.

[1178] Parameters used in the comparison were:
[1179] Scoring matrix: Blosum62
[1180] First Gap: 12
[1181] Extending gap: 2

[1182] A MATGAT table for local alignment of a specific domain, or data on % identity/similarity between specific domains may also be generated.

### Example 23

### Identification of Domains Comprised in Polypeptide Sequences Useful in Performing the Methods of the Invention

[1183] The Integrated Resource of Protein Families, Domains and Sites (InterPro) database is an integrated interface for the commonly used signature databases for text- and sequence-based searches. The InterPro database combines these databases, which use different methodologies and varying degrees of biological information about well-characterized proteins to derive protein signatures. Collaborating databases include SWISS-PROT, PROSITE, TrEMBL, PRINTS, ProDom and Pfam, Smart and TIGRFAMs. Pfam is a large collection of multiple sequence alignments and hidden Markov models covering many common protein domains and families. Pfam is hosted at the Sanger Institute server in the United Kingdom. Interpro is hosted at the European Bioinformatics Institute in the United Kingdom.

[1184] The protein sequences representing the GRP are used as query to search the InterPro database.

### Example 24

### Topology Prediction of the Polypeptide Sequences Useful in Performing the Methods of the Invention

[1185] TargetP 1.1 predicts the subcellular location of eukaryotic proteins. The location assignment is based on the predicted presence of any of the N-terminal pre-sequences: chloroplast transit peptide (cTP), mitochondrial targeting peptide (mTP) or secretory pathway signal peptide (SP). Scores on which the final prediction is based are not really probabilities, and they do not necessarily add to one. However, the location with the highest score is the most likely according to TargetP, and the relationship between the scores (the reliability class) may be an indication of how certain the prediction is. The reliability class (RC) ranges from 1 to 5, where 1 indicates the strongest prediction. TargetP is maintained at the server of the Technical University of Denmark.

[1186] For the sequences predicted to contain an N-terminal presequence a potential cleavage site can also be predicted.

[1187] A number of parameters were selected, such as organism group (non-plant or plant), cutoff sets (none, predefined set of cutoffs, or user-specified set of cutoffs), and the calculation of prediction of cleavage sites (yes or no).

[1188] The protein sequences representing the GRP are used to query TargetP 1.1. The “plant” organism group is selected, no cutoffs defined, and the predicted length of the transit peptide requested.

[1189] Many other algorithms can be used to perform such analyses, including:
[1190] ChloroP 1.1 hosted on the server of the Technical University of Denmark;
[1191] Protein Prowler Subcellular Localisation Predictor version 1.2 hosted on the server of the Institute for Molecular Bioscience, University of Queensland, Brisbane, Australia;
[1192] PENCE Proteome Analyst PA-GOSUB 2.5 hosted on the server of the University of Alberta, Edmonton, Alberta, Canada;
[1193] TMHMM, hosted on the server of the Technical University of Denmark

### Example 25

### Cloning of the Nucleic Acid Sequence Used in the Methods of the Invention

### Cloning of SEQ ID NO: 171:

[1194] The nucleic acid sequence SEQ ID NO: 171 used in the methods of the invention was amplified by PCR using as template a custom-made Arabidopsis thaliana seedlings cDNA library (in pCMV Sport 6.0; Invitrogen, Paisley, UK). PCR was performed using Hifi Taq DNA polymerase in standard conditions, using 200 ng of template in a 50 μl PCR mix. The primers used were prm8667 (SEQ ID NO: 177; sense, start codon in bold):

5′-ggggacaagtttgtacaaaaaagcaggcttaaacaatggactgcaa
catggtatct-3′
and
prm8668 (SEQ ID NO: 178; reverse, complementary):
5′-ggggaccactttgtacaagaaagctgggtcacattacttactcatc
tattttgg-3′,

which include the AttB sites for Gateway recombination. The amplified PCR fragment was purified also using standard methods. The first step of the Gateway procedure, the BP reaction, was then performed, during which the PCR fragment recombines in vivo with the pDONR201 plasmid to produce, according to the Gateway terminology, an “entry clone”. Plasmid pDONR201 was purchased from Invitrogen, as part of the Gateway® technology.

### Cloning of SEQ ID NO: 173:

[1195] A cDNA-AFLP experiment was performed on a synchronized tobacco BY2 cell culture (Nicotiana tabacum L. cv. Bright Yellow-2), and BY2 expressed sequence tags that were cell cycle modulated were elected for further cloning. The expressed sequence tags were used to screen a tobacco cDNA library and to isolate the full-length cDNA of interest, namely one coding for SEQ ID NO: 173.

[1196] A tobacco BY2 (Nicotiana tabacum L. cv. Bright Yellow-2) cultured cell suspension was synchronized by blocking cells in early S-phase with aphidicolin as follows. The cell suspension of Nicotiana tabacum L. cv. Bright Yellow 2 was maintained as described (Nagata et al. Int. Rev. Cytol. 132, 1-30, 1992). For synchronization, a 7-day-old stationary culture was diluted 10-fold in fresh medium supplemented with aphidicolin (Sigma-Aldrich, St. Louis, Mo.; 5 mg/l). After 24 h, cells were released from the block by several washings with fresh medium after which their cell cycle progression resumed.

[1197] Total RNA was prepared using LiCl precipitation and poly(A⁺) RNA was extracted from 500 μg of total RNA using Oligotex columns (Qiagen, Hilden, Germany) according to the manufacturers instructions. Starting from 1 μg of poly(A⁺) RNA, first-strand cDNA was synthesized by reverse transcription with a biotinylated oligo-dT₂₅ primer (Genset, Paris, France) and Superscript II (Life Technologies, Gaithersburg, Md.). Second-strand synthesis was done by strand displacement with Escherichia coli ligase (Life Technologies), DNA polymerase I (USB, Cleveland, Ohio) and RNAse-H (USB).

[1198] Five hundred ng of double-stranded cDNA was used for AFLP analysis as described (Vos et al., Nucleic Acids Res. 23 (21) 4407-4414, 1995; Bachem et al., Plant J. 9 (5) 745-53, 1996) with modifications. The restriction enzymes used were BstYI and MseI (Biolabs) and the digestion was done in two separate steps. After the first restriction digest with one of the enzymes, the 3′ end fragments were trapped on Dyna beads (Dynal, Oslo, Norway) by means of their biotinylated tail, while the other fragments were washed away. After digestion with the second enzyme, the released restriction fragments were collected and used as templates in the subsequent AFLP steps. For pre-amplifications, a MseI primer without selective nucleotides was combined with a BstYI primer containing either a T or a C as 3′ most nucleotide. PCR conditions were as described (Vos et al., 1995). The obtained amplification mixtures were diluted 600-fold and 5 μl was used for selective amplifications using a P³³-labeled BstYI primer and the Amplitaq-Gold polymerase (Roche Diagnostics, Brussels, Belgium). Amplification products were separated on 5% polyacrylamide gels using the Sequigel system (Biorad). Dried gels were exposed to Kodak Biomax films as well as scanned in a PhosphorImager (Amersham Pharmacia Biotech, Little Chalfont, UK).

[1199] Bands corresponding to differentially expressed transcripts, among which the (partial) transcript corresponding to SEQ ID NO: 173, were isolated from the gel and eluted DNA was re-amplified under the same conditions as for selective amplification. Sequence information was obtained either by direct sequencing of the re-amplified polymerase chain reaction product with the selective BstYI primer or after cloning the fragments in pGEM-T easy (Promega, Madison, Wis.) and sequencing of individual clones. The obtained sequences were compared against nucleotide and protein sequences present in the publicly available databases by BLAST sequence alignments (Altschul et al., Nucleic Acids Res. 25 (17) 3389-3402 1997). When available, tag sequences were replaced with longer EST or isolated cDNA sequences to increase the chance of finding significant homology. The physical cDNA clone corresponding to SEQ ID NO 173 was subsequently amplified from a commercial tobacco cDNA library as follows:

[1200] A c-DNA library with an average size of inserts of 1,400 bp was prepared from poly(A⁺) RNA isolated from actively dividing, non-synchronized BY2 tobacco cells. These library-inserts were cloned in the vector pCMVSPORT6.0, comprising an attB Gateway cassette (Life Technologies). From this library, 46,000 clones were selected, arrayed in 384-well microtiter plates, and subsequently spotted in duplicate on nylon filters. The arrayed clones were screened using pools of several hundreds of radioactively labelled tags as probes (including the BY2-tag corresponding to the sequence SEQ ID NO: 173). Positive clones were isolated (among which the clone corresponding to SEQ ID NO: 173), sequenced, and aligned with the tag sequence. Where the hybridisation with the tag failed, the full-length cDNA corresponding to the tag was selected by PCR amplification: tag-specific primers were designed using software commonly available and used in combination with a common vector primer to amplify partial cDNA inserts. Pools of DNA from 50,000, 100,000, 150,000, and 300,000 cDNA clones were used as templates in the PCR amplifications. Amplification products were then isolated from agarose gels, cloned, sequenced and their sequence aligned with those of the tags. Next, the full-length cDNA corresponding to the nucleotide sequence of SEQ ID NO 173 was cloned from the pCMVsport6.0 library vector into pDONR201, a Gateway donor vector (Invitrogen, Paisley, UK) via a LR reaction, resulting in an entry clone.

[1201] The entry clone comprising SEQ ID NO: 171 or SEQ ID NO: 173 was then used in an LR reaction with a destination vector used for Oryza sativa transformation. This vector contained as functional elements within the T-DNA borders: a plant selectable marker; a screenable marker expression cassette; and a Gateway cassette intended for LR in vivo recombination with the nucleic acid sequence of interest already cloned in the entry clone. A rice WSI18 promoter (SEQ ID NO: 175) for seed specific expression was located upstream of this Gateway cassette.

[1202] After the LR recombination step, the resulting expression vector pWSI18::GRP (FIG. 11) was transformed into Agrobacterium strain LBA4044 according to methods well known in the art.

[1203] In an alternative construct the rice GOS2 promoter (SEQ ID NO: 176) was used, resulting in the expression vector pGOS2::GRP.

### Example 26

### Plant Transformation

[1204] Transformation of plants was carried out according to the procedure outlined in Example 7.

### Example 27

### Phenotypic Evaluation Procedure

### 27.1 Evaluation Setup

[1205] Approximately 35 independent T0 rice transformants were generated. The primary transformants were transferred from a tissue culture chamber to a greenhouse for growing and harvest of T1 seed. Six events, of which the T1 progeny segregated 3:1 for presence/absence of the transgene, were retained. For each of these events, approximately 10 T1 seedlings containing the transgene (hetero- and homo-zygotes) and approximately 10 T1 seedlings lacking the transgene (nullizygotes) were selected by monitoring visual marker expression. The transgenic plants and the corresponding nullizygotes were grown side-by-side at random positions. Greenhouse conditions were of shorts days (12 hours light), 28° C. in the light and 22° C. in the dark, and a relative humidity of 70%. Plants grown under non-stress conditions are supplied with water at regular intervals to ensure that water and nutrients are not limiting to satisfy plant needs to complete growth and development.

[1206] Four T1 events were further evaluated in the T2 generation following the same evaluation procedure as for the T1 generation but with more individuals per event. From the stage of sowing until the stage of maturity the plants were passed several times through a digital imaging cabinet. At each time point digital images (2048×1536 pixels, 16 million colours) were taken of each plant from at least 6 different angles.

### Drought Screen

[1207] Plants from T2 seeds were in potting soil under normal conditions until they approached the heading stage. They were then transferred to a “dry” section where irrigation was withheld. Humidity probes were inserted in randomly chosen pots to monitor the soil water content (SWC). When SWC went below certain thresholds, the plants were automatically re-watered continuously until a normal level was reached again. The plants were then re-transferred again to normal conditions. The rest of the cultivation (plant maturation, seed harvest) was the same as for plants not grown under abiotic stress conditions. Growth and yield parameters are recorded as detailed for growth under normal conditions.

### Nitrogen Use Efficiency Screen

[1208] Rice plants from T2 seeds are grown in potting soil under normal conditions except for the nutrient solution. The pots are watered from transplantation to maturation with a specific nutrient solution containing reduced N nitrogen (N) content, usually between 7 to 8 times less. The rest of the cultivation (plant maturation, seed harvest) is the same as for plants not grown under abiotic stress. Growth and yield parameters are recorded as detailed for growth under normal conditions.

### 27.2 Statistical Analysis: F Test

[1209] A two factor ANOVA (analysis of variants) was used as a statistical model for the overall evaluation of plant phenotypic characteristics. An F test was carried out on all the parameters measured of all the plants of all the events transformed with the gene of the present invention. The F test was carried out to check for an effect of the gene over all the transformation events and to verify for an overall effect of the gene, also known as a global gene effect. The threshold for significance for a true global gene effect was set at a 5% probability level for the F test. A significant F test value points to a gene effect, meaning that it is not only the mere presence or position of the gene that is causing the differences in phenotype.

[1210] Because two experiments with overlapping events were carried out, a combined analysis was performed. This is useful to check consistency of the effects over the two experiments, and if this is the case, to accumulate evidence from both experiments in order to increase confidence in the conclusion. The method used was a mixed-model approach that takes into account the multilevel structure of the data (i.e. experiment-event-segregants). P values were obtained by comparing likelihood ratio test to chi square distributions.

### 27.3 Parameters Measured

### Biomass-Related Parameter Measurement

[1211] From the stage of sowing until the stage of maturity the plants were passed several times through a digital imaging cabinet. At each time point digital images (2048×1536 pixels, 16 million colours) were taken of each plant from at least 6 different angles.

[1212] The plant aboveground area (or leafy biomass) was determined by counting the total number of pixels on the digital images from aboveground plant parts discriminated from the background. This value was averaged for the pictures taken on the same time point from the different angles and was converted to a physical surface value expressed in square mm by calibration. Experiments show that the aboveground plant area measured this way correlates with the biomass of plant parts above ground. The above ground area is the area measured at the time point at which the plant had reached its maximal leafy biomass.

[1213] The early vigour is the plant (seedling) aboveground area three weeks post-germination. Early vigour was determined by counting the total number of pixels from aboveground plant parts discriminated from the background. This value was averaged for the pictures taken on the same time point from different angles and was converted to a physical surface value expressed in square mm by calibration. The results described below are for plants three weeks post-germination.

### Seed-Related Parameter Measurements

[1214] The mature primary panicles were harvested, counted, bagged, barcode-labelled and then dried for three days in an oven at 37° C. The panicles were then threshed and all the seeds were collected and counted. The filled husks were separated from the empty ones using an air-blowing device. The empty husks were discarded and the remaining fraction was counted again. The filled husks were weighed on an analytical balance. The number of filled seeds was determined by counting the number of filled husks that remained after the separation step. The total seed yield was measured by weighing all filled husks harvested from a plant. Total seed number per plant was measured by counting the number of husks harvested from a plant. Thousand Kernel Weight (TKW) is extrapolated from the number of filled seeds counted and their total weight. The Harvest Index (HI) in the present invention is defined as the ratio between the total seed yield and the above ground area (mm²), multiplied by a factor 10⁶. The total number of flowers per panicle as defined in the present invention is the ratio between the total number of seeds and the number of mature primary panicles. The seed fill rate as defined in the present invention is the proportion (expressed as a %) of the number of filled seeds over the total number of seeds (or florets).

### Example 28

### Results of the Phenotypic Evaluation of the Transgenic Plants

[1215] The transgenic rice plants expressing the GRP nucleic acid represented by SEQ ID NO: 171 under control of the WSI18 promoter showed an increase of more than 5% for biomass, total weight of seeds, number of filled seeds, fill rate, and harvest index, when grown under conditions of drought stress. When grown under non-stress conditions, there was an increase of more than 5% observed for biomass, number of filled seeds, total weight of seeds, and number of first panicles.

[1216] For the construct with SEQ ID NO: 171 under control of the GOS2 promoter, an increase was observed in the transgenic plants for early vigour and for flowers per panicle, and for each these parameters, the increase was more than 5%.

[1217] Transgenic plants expressing SEQ ID NO: 173 under control of the WSI18 promoter and grown under conditions of drought stress, showed an increase in total weight of seeds, number of filled seeds, number of flowers per panicle, harvest index, and Thousand Kernel Weight. For Thousand Kernel Weight the observed increase was at least 3.5% and for the other parameters the increase was more than 5%.

### IV. Plant Homeodomain Finger-Homeodomain (PHDf-HD) Polypeptide

### Example 29

### Identification of Sequences Related to the Nucleic Acid Sequence Used in the Methods of the Invention

[1218] Sequences (full length cDNA, ESTs or genomic) related to the nucleic acid sequence used in the methods of the present invention were identified amongst those maintained in the Entrez Nucleotides database at the National Center for Biotechnology Information (NCBI) using database sequence search tools, such as the Basic Local Alignment Tool (BLAST) (Altschul et al. (1990) J. Mol. Biol. 215:403-410; and Altschul et al. (1997) Nucleic Acids Res. 25:3389-3402). The program is used to find regions of local similarity between sequences by comparing nucleic acid sequence or polypeptide sequences to sequence databases and by calculating the statistical significance of matches. For example, the polypeptide encoded by the nucleic acid sequence of the present invention was used for the TBLASTN algorithm, with default settings and the filter to ignore low complexity sequences set off. The output of the analysis was viewed by pairwise comparison, and ranked according to the probability score (E-value), where the score reflect the probability that a particular alignment occurs by chance (the lower the E-value, the more significant the hit). In addition to E-values, comparisons were also scored by percentage identity. Percentage identity refers to the number of identical nucleotides (or amino acids) between the two compared nucleic acid sequence (or polypeptide) sequences over a particular length. In some instances, the default parameters may be adjusted to modify the stringency of the search. For example the E-value may be increased to show less stringent matches. This way, short nearly exact matches may be identified.

[1219] Table D1 provides a list of nucleic acid sequences related to the PHDf-HDnucleic acid sequence used in the methods of the present invention.

TABLE D1
Examples of PHDf-HD polypeptides:

| | | Nucleic acid | Polypeptide | Database | |
|---|---|---|---|---|---|
| Name | Source organism | SEQ ID NO: | SEQ ID NO: | accession # | Status |
| Orysa_PHDf_HD | Otyza sativa | 179 | 180 | Os02g05450.1 | FL |
| | | | | NM_001052422 | |
| Arath_PHDf_HD_PRHA | Arabidopsis thaliana | 181 | 182 | At4g029940 | FL |
| | | | | NM_119140 | |
| Eucgr_PHDf_HD | Eucalyptus grandis | 183 | 184 | ADW17964 | FL |
| Medtr_PHDf_HD | Medicago truncatula | 185 | 186 | AC123547 | FL |
| Pinra_PHDf_HD | Pinus radiata | 187 | 188 | ADW18458 | FL |
| Poptr_PHDf_HD | Populus tremuloides | 189 | 190 | scaff_VI.625 | FL |
| Sacof_PHDf_HD | Saccharum officinarum | 191 | 192 | CA157855.1, | FL |
| | | | | CA261734.1, | |
| | | | | CA253314.1, | |
| | | | | CA220753.1, | |
| | | | | CA201958.1 | |
| Vitvi_PHDf_HD | Vitis vinifera | 193 | 194 | AM477372.2, | FL |
| | | | | AM488059.1 | |
| Zeama_PHDf_HD | Zea mays | 195 | 196 | EE162310, | FL |
| | | | | DN204182, | |
| | | | | CF057937 | |
| Arath_PHDf_HD_HAT3.1 | Arabidopsis thaliana | 197 | 198 | AT3G19510 | FL |
| | | | | NM_112838 | |
| Lotja_PHDf_HD | Lotus japonicus | 199 | 200 | AP006117.1 | FL |
| Orysa_PHDf_HD_HAZ1 | Oryza sativa | 201 | 202 | AB081340 | FL |
| | | | | Os06g12400.1 | |
| Petcr_PHDf_HD_PRHP | Petroselinum crispum | 203 | 204 | L21975 | FL |
| Zeama_PHDf_HD_HOX1a | Zea mays | 205 | 206 | X67561 | FL |
| Zeama_PHDf_HD_HOX1b | Zea mays | 207 | 208 | X92428 | FL |
| Zeama_PHDf_HD_HOX2a | Zea mays | 209 | 210 | X89760.1 | FL |
| Zeama_PHDf_HD_HOX2b | Zea mays | 211 | 212 | X89761 | FL |
| Vitvi_PHDf_HD_II | Vitis vinifera | 213 | 214 | AM464161.2 | FL |
| | | | | AM478203.2 | |
| Poptr_PHDf_HD_II | Populus tremuloides | 215 | 216 | scaff_IX.730 | FL |
| Poptr_PHDf_HD_III | Populus tremuloides | 217 | 218 | LG_I002624 | FL |
| Poptr_PHDf_HD_IV | Populus tremuloides | 219 | 220 | LG_XVIII1192 | FL |
| Ostta_PHDf_HD | Ostreococcus tauri | 221 | 222 | CR954214.4 | FL |
| Aqufor_PHDf_HD partial | Aquilegia formosa x | 223 | 224 | DR914726.1, | Partial |
| | Aquilegia pubescens | | | DR941696.1, | |
| | | | | DR943570.1 | |
| Glyma_PHDf_HD | Glycine max | 225 | 226 | Contig | Partial |
| | | | | GM06LC25006 | |
| Lotco_PHDf_HD | Lotus corniculatus | 227 | 228 | AP004517 | Partial |
| Sorpr_PHDf_HD 3′ | Sorghum propinquum | 229 | 230 | BF656332 | Partial |
| Sorpr_PHDf_HD 5′ | Sorghum propinquum | 231 | 232 | BF704605 | Partial |
| Phypa_PHDf_HD | Physcomitrella patens | 238 | 239 | XM_001762483 | FL |
| Phypa_PHDf_HD | Physcomitrella patens | 240 | 241 | XM_001779822 | FL |
| Zeama_PHDf_HD | Zea mays | 242 | 243 | | FL |

### Example 30

### Alignment of PHDf-HD Polypeptide Sequences

[1220] The University of Potsdam, Germany, has created plant transcription factor databases, including for Orysa sativa named riceTFDB. The polypeptide sequences corresponding to the transcription factors belonging to the HD family (120 gene models (91 loci) identified so far) were all downloaded, including the two PHDf-HD polypeptides (Os02g05450.1 and Os06g12400.1) identified to date. The polypeptide sequences of Table D1 of the present application were added (when full length, i.e. 21 polypeptide sequences) to the set of the HD family.

[1221] Alignment of all the polypeptide sequences was performed the Clustal algorithm (1.83) of progressive alignment, using default values (Thompson et al. (1997) Nucleic Acids Res 25:4876-4882; Chenna et al. (2003). Nucleic Acids Res 31:3497-3500). A neighbour-joining tree was constructed thereafter, and is represented in FIG. 13 of the present application. The group of interest, comprising the two rice paralogs (Os02g05450.1 and Os06g12400.1) has been circled. Any polypeptide falling within this HD group (after a new multiple alignment step as described hereinabove) is considered to be useful in performing the methods of the invention as described herein.

[1222] In a multiple sequence alignment of the full length PHDf-HD polypeptides of Table D1, a number of features can be identified, and are marked in FIG. 17. From the N-terminus to the C-terminus of the polypeptides are: (i) a predicted nuclear localisation signal (NLS); (ii) a leucine zipper (ZIP), with four heptads (boxed in which usually a leucine (occasionally an isoleucine, a valine, or a methionine)) appears every seventh amino acid; (iii) a PHD finger (PHDf), with the typical C4HC3 (four cysteines, one histidine, three cysteines) with a characteristics cysteine spacing; (iv) an acidic stretch (rich in acidic amino acids D and E); (v) basic stretches (rich in basic amino acids K and R); (vi) a homeodomain (HD).

### Example 31

### Calculation of Global Percentage Identity Between Polypeptide Sequences Useful in Performing the Methods of the Invention

[1223] Global percentages of similarity and identity between full length polypeptide sequences useful in performing the methods of the invention were determined using one of the methods available in the art, the MatGAT (Matrix Global Alignment Tool) software (BMC Bioinformatics. 2003 4:29. MatGAT: an application that generates similarity/identity matrices using protein or DNA sequences. Campanella J J, Bitincka L, Smalley J; software hosted by Ledion Bitincka). MatGAT software generates similarity/identity matrices for DNA or protein sequences without needing pre-alignment of the data. The program performs a series of pair-wise alignments using the Myers and Miller global alignment algorithm (with a gap opening penalty of 12, and a gap extension penalty of 2), calculates similarity and identity using for example Blosum 62 (for polypeptides), and then places the results in a distance matrix. Sequence similarity is shown in the bottom half of the dividing line and sequence identity is shown in the top half of the diagonal dividing line.

[1224] Parameters used in the comparison were:
[1225] Scoring matrix: Blosum62
[1226] First Gap: 12
[1227] Extending gap: 2

[1228] Results of the software analysis are shown in Table D2 for the global similarity and identity over the full length of the polypeptide sequences (excluding the partial polypeptide sequences). Percentage identity is given above the diagonal and percentage similarity is given below the diagonal.

[1229] The percentage identity between the PHDf-HD polypeptide sequences useful in performing the methods of the invention can be as low as 15% amino acid identity compared to SEQ ID NO: 180.

TABLE D2
MatGAT results for global similarity and identity over the full length of the polypeptide sequences.

| | 1 | 2 | 3 | 4 | 5 | 6 | 7 | 8 | 9 | 10 | 11 | 12 | 13 | 14 | 15 | 16 | 17 | 18 | 19 | 20 | 21 |
|---|---|---|---|---|---|---|---|---|---|---|---|---|---|---|---|---|---|---|---|---|---|
| 1. Arath_PHDf_HD_PRHA | | 25 | 31 | 40 | 19 | 38 | 26 | 17 | 32 | 40 | 20 | 19 | 40 | 30 | 40 | 23 | 31 | 25 | 25 | 18 | 19 |
| 2. Arath_PHDf-HD_HAT3 | 44 | | 23 | 27 | 33 | 26 | 34 | 28 | 27 | 26 | 34 | 35 | 27 | 23 | 28 | 34 | 24 | 36 | 35 | 18 | 20 |
| 3. Orysa_PHDf_HD | 46 | 39 | | 35 | 18 | 34 | 20 | 18 | 31 | 34 | 17 | 18 | 33 | 56 | 36 | 21 | 57 | 21 | 23 | 15 | 15 |
| 4. Eucgr_PHDf_HD | 57 | 45 | 51 | | 21 | 47 | 27 | 20 | 36 | 50 | 22 | 21 | 51 | 32 | 52 | 25 | 32 | 26 | 27 | 17 | 17 |
| 5. Lotja_PHDf-HD | 36 | 47 | 31 | 35 | | 22 | 29 | 32 | 23 | 20 | 39 | 40 | 20 | 18 | 21 | 34 | 18 | 31 | 32 | 20 | 22 |
| 6. Medtr_PHDf_HD | 55 | 44 | 51 | 64 | 36 | | 26 | 19 | 35 | 50 | 20 | 20 | 49 | 30 | 50 | 25 | 32 | 27 | 26 | 17 | 17 |
| 7. Orysa_PHDf-HD_HAZ1 | 42 | 50 | 35 | 47 | 45 | 43 | | 26 | 25 | 25 | 29 | 29 | 26 | 21 | 26 | 32 | 21 | 50 | 46 | 29 | 30 |
| 8. Petcr_PHDf_HD_PRHP | 31 | 39 | 28 | 32 | 48 | 31 | 38 | | 22 | 20 | 32 | 33 | 20 | 18 | 20 | 30 | 18 | 26 | 25 | 19 | 21 |
| 9. Pinra_PHDf_HD | 53 | 44 | 47 | 51 | 42 | 50 | 44 | 39 | | 36 | 23 | 23 | 37 | 28 | 39 | 26 | 30 | 25 | 27 | 19 | 19 |
| 10. Poptr_PHDf_HD_I | 58 | 45 | 52 | 67 | 36 | 66 | 45 | 33 | 52 | | 20 | 21 | 84 | 30 | 55 | 25 | 31 | 25 | 25 | 17 | 17 |
| 11. Poptr_PHDf_HD_III | 36 | 47 | 30 | 34 | 56 | 35 | 44 | 46 | 41 | 36 | | 80 | 21 | 19 | 22 | 37 | 18 | 31 | 31 | 20 | 20 |
| 12. Poptr_PHDf_HD_II | 36 | 49 | 31 | 34 | 57 | 34 | 46 | 47 | 42 | 35 | 86 | | 21 | 18 | 22 | 38 | 18 | 30 | 30 | 20 | 21 |
| 13. Poptr_PHDf_HD_IV | 59 | 46 | 51 | 68 | 37 | 67 | 44 | 33 | 54 | 91 | 35 | 35 | | 30 | 57 | 25 | 32 | 25 | 25 | 17 | 17 |
| 14. Sacof_PHDf_HD | 48 | 43 | 69 | 51 | 31 | 50 | 38 | 29 | 45 | 51 | 34 | 33 | 51 | | 34 | 22 | 83 | 21 | 22 | 15 | 16 |
| 15. Vitvi_PHDf_HD_I | 58 | 47 | 52 | 69 | 36 | 67 | 43 | 32 | 52 | 74 | 36 | 35 | 75 | 52 | | 23 | 34 | 27 | 25 | 16 | 17 |
| 16. Vitvi_PHDf_HD_II | 39 | 47 | 36 | 39 | 56 | 39 | 45 | 47 | 43 | 40 | 56 | 57 | 40 | 36 | 41 | | 22 | 32 | 31 | 23 | 24 |
| 17. Zeama_PHDf_HD | 48 | 41 | 70 | 51 | 32 | 52 | 38 | 30 | 45 | 54 | 33 | 32 | 53 | 87 | 53 | 34 | | 22 | 22 | 15 | 15 |
| 18. Zeama_hox1a | 43 | 54 | 39 | 44 | 43 | 44 | 63 | 38 | 43 | 44 | 44 | 43 | 45 | 42 | 43 | 46 | 42 | | 83 | 24 | 24 |
| 19. Zeama_hox1b | 42 | 53 | 40 | 44 | 44 | 42 | 60 | 36 | 43 | 44 | 44 | 43 | 45 | 41 | 44 | 45 | 41 | 88 | | 23 | 23 |
| 20. Zeama_hox2a | 27 | 27 | 24 | 25 | 32 | 25 | 36 | 31 | 31 | 26 | 30 | 31 | 27 | 25 | 26 | 34 | 24 | 31 | 30 | | 81 |
| 21. Zeama_Hox2b | 29 | 28 | 23 | 27 | 33 | 27 | 37 | 34 | 31 | 27 | 32 | 33 | 26 | 25 | 27 | 35 | 25 | 32 | 30 | 86 | |

[1230] The percentage identity can be substantially increased if the identity calculation is performed between the conserved ZIP/PHDf domain (conserved leucine zipper/plant homeodomain finger domain, comprising the Zip and PHDf domains) of SEQ ID NO: 180 (as represented by SEQ ID NO: 233) and the conserved ZIP/PHDf domain of the polypeptides useful in performing the invention. The conserved ZIP/PHDf of SEQ ID NO: 233 is in total 180 contiguous amino acids long. Percentage identity over the conserved ZIP/PHDf domain amongst the polypeptide sequences useful in performing the methods of the invention ranges between 30% and 75% amino acid identity, as shown in Table D3.

TABLE D3
MatGAT results for global similarity and identity over the conserved ZIP/PHDf domain amongst of the polypeptide sequences.

| | 1 | 2 | 3 | 4 | 5 | 6 | 7 | 8 | 9 | 10 | 11 | 12 | 13 | 14 | 15 | 16 | 17 | 18 | 19 | 20 | 21 |
|---|---|---|---|---|---|---|---|---|---|---|---|---|---|---|---|---|---|---|---|---|---|
| 1. ZIP/PHDf_Arath_PHDf_HD_PRHA | | 52 | 50 | 77 | 48 | 74 | 53 | 48 | 64 | 73 | 48 | 46 | 72 | 51 | 76 | 50 | 52 | 50 | 50 | 53 | 53 |
| 2. ZIP/PHDf_Arath_PHDf-HD_HAT3 | 70 | | 44 | 52 | 73 | 54 | 70 | 69 | 56 | 52 | 75 | 75 | 51 | 43 | 53 | 78 | 46 | 65 | 67 | 64 | 65 |
| 3. ZIP/PHDf_Orysa_PHDf_HD | 69 | 60 | | 56 | 39 | 54 | 37 | 39 | 56 | 53 | 39 | 38 | 53 | 70 | 59 | 41 | 71 | 37 | 38 | 34 | 33 |
| 4. ZIP/PHDf_Eucgr_PHDf_HD | 90 | 70 | 73 | | 52 | 79 | 48 | 50 | 71 | 82 | 51 | 49 | 81 | 55 | 84 | 52 | 56 | 48 | 48 | 49 | 48 |
| 5. ZIP/Lotja_PHDf-HD | 67 | 89 | 59 | 69 | | 52 | 64 | 69 | 52 | 47 | 76 | 76 | 47 | 37 | 50 | 78 | 38 | 64 | 66 | 61 | 61 |
| 6. ZIP/Medtr_PHDf_HD | 86 | 70 | 72 | 87 | 68 | | 52 | 49 | 66 | 74 | 49 | 48 | 75 | 50 | 79 | 51 | 53 | 51 | 51 | 52 | 52 |
| 7. ZIP/PHDf_Orysa_PHDf-HD_HAZ1 | 69 | 83 | 54 | 67 | 83 | 68 | | 64 | 51 | 47 | 68 | 67 | 47 | 35 | 47 | 68 | 37 | 79 | 80 | 82 | 84 |
| 8. ZIP/PHDf_Petcr_PHDf_HD_PRHP | 67 | 80 | 54 | 66 | 83 | 65 | 78 | | 53 | 47 | 71 | 73 | 45 | 39 | 48 | 74 | 42 | 62 | 63 | 62 | 62 |
| 9. ZIP/PHDf_Pinra_PHDf_HD | 82 | 74 | 72 | 83 | 73 | 82 | 70 | 69 | | 66 | 53 | 52 | 67 | 52 | 73 | 55 | 54 | 53 | 52 | 53 | 52 |
| 10. ZIP/PHDf_Poptr_PHDf_HD_I | 87 | 70 | 72 | 92 | 69 | 88 | 67 | 66 | 83 | | 48 | 47 | 93 | 53 | 82 | 50 | 55 | 49 | 48 | 49 | 49 |
| 11. ZIP/PHDf_Poptr_PHDf_HD_III | 66 | 87 | 57 | 67 | 90 | 65 | 82 | 82 | 70 | 67 | | 93 | 48 | 36 | 51 | 82 | 39 | 67 | 70 | 65 | 64 |
| 12. ZIP/PHDf_Poptr_PHDf_HD_II | 65 | 88 | 56 | 66 | 90 | 65 | 81 | 84 | 69 | 66 | 96 | | 46 | 35 | 49 | 83 | 38 | 67 | 69 | 64 | 64 |
| 13. ZIP/PHDf_Poptr_PHDf_HD_IV | 86 | 70 | 72 | 91 | 69 | 88 | 67 | 66 | 82 | 97 | 67 | 66 | | 52 | 82 | 48 | 54 | 47 | 47 | 48 | 47 |
| 14. ZIP/PHDf_Sacof_PHDf_HD | 71 | 60 | 82 | 73 | 57 | 69 | 55 | 57 | 70 | 72 | 56 | 55 | 72 | | 57 | 39 | 92 | 35 | 35 | 33 | 33 |
| 15. ZIP/PHDf_Vitvi_PHDf_HD_I | 89 | 71 | 73 | 90 | 70 | 88 | 67 | 64 | 84 | 91 | 67 | 66 | 89 | 73 | | 51 | 58 | 48 | 48 | 48 | 48 |
| 16. ZIP/PHDf_Vitvi_PHDf_HD_II | 67 | 88 | 58 | 69 | 91 | 68 | 84 | 84 | 73 | 69 | 90 | 93 | 67 | 57 | 69 | | 42 | 65 | 67 | 65 | 64 |
| 17. ZIP/PHDf_Zeama_PHDf_HD | 74 | 61 | 83 | 73 | 58 | 70 | 56 | 58 | 69 | 73 | 57 | 55 | 72 | 96 | 73 | 57 | | 38 | 37 | 35 | 34 |
| 18. ZIP/PHDf_Zeama_hox1a | 71 | 84 | 59 | 71 | 85 | 70 | 88 | 79 | 74 | 72 | 83 | 82 | 71 | 61 | 70 | 85 | 62 | | 94 | 74 | 76 |
| 19. ZIP/PHDf_Zeama_hox1b | 70 | 84 | 58 | 69 | 85 | 68 | 89 | 79 | 74 | 70 | 84 | 83 | 70 | 60 | 70 | 85 | 60 | 98 | | 75 | 78 |
| 20. ZIP/PHDf_Zeama_hox2a | 67 | 80 | 54 | 67 | 83 | 67 | 89 | 76 | 70 | 67 | 80 | 79 | 66 | 54 | 66 | 82 | 56 | 87 | 87 | | 92 |
| 21. ZIP/PHDf_Zeama_Hox2b | 67 | 82 | 53 | 66 | 83 | 67 | 90 | 77 | 71 | 66 | 80 | 79 | 67 | 53 | 67 | 82 | 55 | 88 | 88 | 97 | |

[1231] The percentage identity can also be calculated between the conserved HD of SEQ ID NO: 180 (as represented by SEQ ID NO: 234) and the conserved HD of the polypeptides useful in performing the invention. Percentage identity over the conserved HD amongst the polypeptide sequences useful in performing the methods of the invention ranges between 25% and 70% amino acid identity, as shown in Table D4.

TABLE D4
MatGAT results for global similarity and identity over the conserved HD amongst of the polypeptide sequences.

| | 1 | 2 | 3 | 4 | 5 | 6 | 7 | 8 | 9 | 10 | 11 | 12 | 13 | 14 | 15 | 16 | 17 | 18 | 19 | 20 | 21 |
|---|---|---|---|---|---|---|---|---|---|---|---|---|---|---|---|---|---|---|---|---|---|
| 1. HD_Arath_PHDf_HD_PRHA | | 34 | 54 | 72 | 36 | 72 | 38 | 36 | 58 | 68 | 38 | 36 | 70 | 54 | 70 | 34 | 54 | 36 | 33 | 29 | 27 |
| 2. HD_Arath_PHDf-HD_HAT3 | 56 | | 28 | 32 | 54 | 34 | 40 | 58 | 30 | 32 | 54 | 58 | 32 | 28 | 32 | 58 | 28 | 42 | 39 | 40 | 39 |
| 3. HD_Orysa_PHDf_HD | 76 | 60 | | 68 | 42 | 58 | 42 | 36 | 46 | 64 | 38 | 40 | 66 | 94 | 62 | 42 | 92 | 38 | 35 | 35 | 33 |
| 4. HD_Eucgr_PHDf_HD | 86 | 58 | 78 | | 42 | 72 | 44 | 42 | 60 | 82 | 38 | 38 | 84 | 66 | 76 | 42 | 66 | 44 | 41 | 35 | 33 |
| 5. HD_Lotja_PHDf-HD | 60 | 72 | 66 | 64 | | 38 | 52 | 58 | 36 | 42 | 64 | 68 | 42 | 42 | 40 | 68 | 40 | 56 | 55 | 50 | 46 |
| 6. HD_Medtr_PHDf_HD | 78 | 60 | 70 | 82 | 66 | | 36 | 36 | 62 | 68 | 38 | 36 | 70 | 58 | 66 | 36 | 58 | 40 | 37 | 27 | 27 |
| 7. HD_Orysa_PHDf-HD_HAZ1 | 56 | 54 | 64 | 62 | 66 | 58 | | 44 | 26 | 44 | 50 | 48 | 44 | 42 | 40 | 46 | 42 | 70 | 65 | 73 | 71 |
| 8. HD_Petcr_PHDf_HD_PRHP | 58 | 74 | 58 | 56 | 66 | 58 | 58 | | 36 | 42 | 54 | 58 | 42 | 36 | 38 | 62 | 36 | 50 | 45 | 40 | 39 |
| 9. HD_Pinra_PHDf_HD | 74 | 54 | 64 | 72 | 58 | 72 | 50 | 52 | | 58 | 30 | 32 | 60 | 44 | 56 | 36 | 44 | 28 | 28 | 21 | 19 |
| 10. HD_Poptr_PHDf_HD_I | 86 | 56 | 78 | 92 | 64 | 84 | 64 | 56 | 74 | | 36 | 36 | 98 | 64 | 72 | 42 | 64 | 42 | 39 | 35 | 33 |
| 11. HD_Poptr_PHDf_HD_III | 54 | 72 | 62 | 60 | 82 | 58 | 66 | 66 | 54 | 58 | | 88 | 36 | 38 | 38 | 72 | 38 | 52 | 49 | 46 | 44 |
| 12. HD_Poptr_PHDf_HD_II | 56 | 72 | 64 | 62 | 82 | 60 | 68 | 66 | 56 | 60 | 100 | | 36 | 40 | 38 | 78 | 40 | 50 | 47 | 46 | 44 |
| 13. HD_Poptr_PHDf_HD_IV | 88 | 56 | 80 | 94 | 64 | 86 | 64 | 56 | 76 | 98 | 58 | 60 | | 66 | 72 | 42 | 66 | 42 | 39 | 35 | 33 |
| 14. HD_Sacof_PHDf_HD | 74 | 60 | 94 | 76 | 64 | 72 | 62 | 56 | 62 | 76 | 60 | 62 | 78 | | 64 | 42 | 98 | 36 | 33 | 35 | 33 |
| 15. HD_Vitvi_PHDf_HD_I | 82 | 60 | 80 | 86 | 70 | 80 | 60 | 58 | 74 | 88 | 62 | 64 | 88 | 82 | | 38 | 64 | 40 | 37 | 29 | 27 |
| 16. HD_Vitvi_PHDf_HD_II | 64 | 76 | 66 | 66 | 82 | 68 | 64 | 74 | 56 | 66 | 84 | 84 | 66 | 64 | 68 | | 40 | 48 | 43 | 44 | 44 |
| 17. HD_Zeama_PHDf_HD | 74 | 60 | 94 | 76 | 64 | 72 | 62 | 56 | 62 | 76 | 60 | 62 | 78 | 100 | 82 | 64 | | 36 | 33 | 35 | 33 |
| 18. HD_Zeama_hox1a | 56 | 60 | 62 | 60 | 66 | 60 | 78 | 60 | 52 | 62 | 62 | 64 | 62 | 58 | 60 | 68 | 56 | | 86 | 60 | 56 |
| 19. HD_Zeama_hox1b | 57 | 63 | 61 | 61 | 69 | 61 | 80 | 63 | 51 | 63 | 67 | 69 | 63 | 57 | 61 | 71 | 55 | 92 | | 59 | 53 |
| 20. HD_Zeama_hox2a | 58 | 60 | 60 | 60 | 65 | 64 | 89 | 60 | 52 | 62 | 64 | 64 | 62 | 60 | 62 | 64 | 58 | 77 | 81 | | 90 |
| 21. HD_Zeama_Hox2b | 56 | 56 | 56 | 56 | 62 | 58 | 85 | 54 | 48 | 58 | 60 | 60 | 58 | 56 | 58 | 62 | 54 | 71 | 77 | 92 | |

### Example 32

### Identification of Domains Comprised in Polypeptide Sequences Useful in Performing the Methods of the Invention

[1232] The Integrated Resource of Protein Families, Domains and Sites (InterPro) database is an integrated interface for the commonly used signature databases for text- and sequence-based searches. The InterPro database combines these databases, which use different methodologies and varying degrees of biological information about well-characterized proteins to derive protein signatures. Collaborating databases include SWISS-PROT, PROSITE, TrEMBL, PRINTS, ProDom and Pfam, Smart and TIGRFAMs. Interpro is hosted at the European Bioinformatics Institute in the United Kingdom.

[1233] The results of the InterPro scan of the polypeptide sequence as represented by SEQ ID NO: 180 are presented in Table D5.

TABLE D5
InterPro scan results of the polypeptide sequence as represented by
SEQ ID NO: 180

| | | Integrated | Integrated | Amino acid |
|---|---|---|---|---|
| InterPro | Integrated | database | database | coordinates |
| accession | database | accession | accession | on SEQ ID |
| number | name | number | name | NO: 180 |
| IPR0013556 | ProDom | PD000010 | PRH_ARATH_ | 439-497 |
| Homeobox | | | P48785 | |
| IPR0013556 | PFAM | PF00046 | Homeobox | 439-495 |
| Homeobox | | | | |
| IPR0013556 | SMART | SM00389 | HOX | 438-500 |
| Homeobox | | | | |
| IPR0013556 | Profile | PS50071 | Homeobox_2 | 436-496 |
| Homeobox | | | | |
| IPR00195 | PFAM | PF00628 | PHD | 197-251 |
| Zinc-finger, | | | | |
| PHD-type | | | | |
| IPR00195 | SMART | SM00249 | PHD | 197-249 |
| Zinc-finger, | | | | |
| PHD-type | | | | |
| IPR00195 | Profile | PS50016 | ZF_PHD_2 | 195-251 |
| Zinc-finger, | | | | |
| PHD-type | | | | |
| IPR012287 | Gene3D | G3DSA: | No description | 436-501 |
| Homeodomain- | | 1.10.10.60 | | |
| related | | | | |
| IPR013256 | SMART | SM00784 | No description | 78-154 |
| Chromatin | | | | |
| SPT2 | | | | |
| Untegrated | PANTHER | PTHR19418 | Homeobox | 397-414 |
| IPR | | | protein | 431-590 |

[1234] The results of the InterPro scan clearly identifies the essential features of a PHDf-HD polypeptide, i.e., a PHDf zinc finger and homeobox, as represented for example respectively by Pfam entries PF00628 and PF00046.

[1235] HDs are known to have canonical residues. The HD of PHDf-HD polypeptides is highly divergent in sequence even at positions that are almost invariable among homeodomains. The sequence logo of the HD of the PHDf-HD polypeptides of Table D1, is shown in FIG. 15. Sequence logos are a graphical representation of an amino acid or nucleic acid multiple sequence alignment. Each logo consists of stacks of symbols, one stack for each position in the sequence. The overall height of the stack indicates the sequence conservation at that position, while the height of symbols within the stack indicates the relative frequency of each amino or nucleic acid at that position. In general, a sequence logo provides a richer and more precise description of, for example, a binding site, than would a consensus sequence. The algorithm (WebLogo) to produce such logos is available at the server of the University of California, Berkeley. The HD as represented by SEQ ID NO: 234, and comprised in SEQ ID NO: 180, is in accordance with the sequence logo as represented in FIG. 15. Polypeptides useful in performing the methods according to the invention comprise an HD comprised in the sequence logo as shown in FIG. 15.

### Example 33

### Prediction of Secondary Structure Features of the Polypeptide Sequences Useful in Performing the Methods of the Invention

[1236] Coiled coils usually contain a repeated seven amino acid residue pattern called heptad repeats. Coiled coils are important to identify for protein-protein interactions, such as oligomerization, either of identical proteins, of proteins of the same family, or of unrelated proteins. Recently much progress has been made in computational prediction of coiled coils from sequence data. Many algorithms well known to a person skilled in the art are available at the ExPASy Proteomics tools. One of them, COILS, is a program that compares a sequence to a database of known parallel two-stranded coiled-coils and derives a similarity score. By comparing this score to the distribution of scores in globular and coiled-coil proteins, the program then calculates the probability that the sequence will adopt a coiled-coil conformation.

[1237] The PHDf-HD polypeptide as represented by SEQ ID NO: 180, has two N-terminal predicted coiled coil domains, with a high probability, in all three windows (14, 21 and 28) examined. In Table D6, the residue coordinates, residues, the three windows and corresponding probability values are shown. In FIG. 16, is the graphical output of the COILS algorithm on the polypeptide as represented by SEQ ID NO: 180, where the two predicted coiled coils are clearly visible in the N-terminal half of the polypeptide, in all three windows (as represented by the three lines).

TABLE D6
Numerical output of the COILS algorithm on the polypeptide as represented by SEQ
ID NO: 180. The residue coordinates (#) residues, the three windows and corresponding
probability values are shown. Probabilities above 0.09 are shown in grey.

| # | Residue | Window = 14 | Prob | Window = 21 | Prob | Window = 28 | Prob |
|---|---|---|---|---|---|---|---|
| 87 | P | d | 0.001 | e | 0.001 | E | 0.001 |
| 88 | T | e | 0.063 | f | 0.274 | F | 0.099 |
| 89 | R | f | 0.063 | g | 0.567 | G | 0.099 |
| 90 | R | g | 0.063 | a | 0.567 | A | 0.099 |
| 91 | K | b | 0.066 | b | 0.642 | B | 0.188 |
| 92 | H | c | 0.066 | c | 0.642 | C | 0.188 |
| 93 | K | d | 0.069 | d | 0.642 | D | 0.591 |
| 94 | Q | e | 0.178 | e | 0.642 | E | 0.672 |
| 95 | K | f | 0.335 | f | 0.642 | F | 0.672 |
| 96 | R | g | 0.335 | g | 0.642 | G | 0.772 |
| 97 | K | a | 0.335 | a | 0.642 | A | 0.772 |
| 98 | N | b | 0.347 | b | 0.642 | B | 0.772 |
| 99 | D | c | 0.347 | c | 0.642 | C | 0.772 |
| 100 | E | d | 0.347 | d | 0.642 | D | 0.772 |
| 101 | S | e | 0.347 | e | 0.642 | E | 0.808 |
| 102 | D | f | 0.347 | f | 0.642 | F | 0.808 |
| 103 | E | g | 0.347 | g | 0.642 | g | 0.808 |
| 104 | V | a | 0.347 | a | 0.642 | a | 0.808 |
| 105 | S | b | 0.347 | b | 0.642 | b | 0.808 |
| 106 | R | c | 0.347 | c | 0.642 | c | 0.808 |
| 107 | M | d | 0.347 | d | 0.642 | d | 0.808 |
| 108 | E | e | 0.347 | e | 0.642 | e | 0.808 |
| 109 | K | f | 0.347 | f | 0.642 | F | 0.808 |
| 110 | R | g | 0.347 | g | 0.642 | g | 0.808 |
| 111 | A | a | 0.347 | a | 0.642 | a | 0.808 |
| 112 | R | b | 0.307 | b | 0.514 | b | 0.808 |
| 113 | Y | c | 0.066 | c | 0.503 | c | 0.808 |
| 114 | L | d | 0.262 | d | 0.503 | d | 0.808 |
| 115 | L | e | 0.262 | e | 0.503 | e | 0.808 |
| 116 | I | f | 0.262 | f | 0.503 | F | 0.808 |
| 117 | K | g | 0.262 | g | 0.503 | g | 0.808 |
| 118 | I | a | 0.262 | a | 0.503 | a | 0.808 |
| 119 | K | b | 0.262 | b | 0.503 | b | 0.808 |
| 120 | Q | c | 0.262 | c | 0.503 | c | 0.808 |
| 121 | E | d | 0.262 | d | 0.503 | d | 0.808 |
| 122 | Q | e | 0.262 | e | 0.503 | e | 0.808 |
| 123 | N | f | 0.262 | f | 0.503 | F | 0.808 |
| 124 | L | g | 0.262 | g | 0.434 | g | 0.808 |
| 125 | L | a | 0.262 | a | 0.434 | a | 0.808 |
| 126 | D | b | 0.262 | b | 0.434 | b | 0.808 |
| 127 | A | c | 0.262 | c | 0.304 | c | 0.808 |
| 128 | Y | d | 0.145 | d | 0.304 | d | 0.808 |
| 129 | S | e | 0.145 | e | 0.044 | e | 0.808 |
| 130 | G | f | 0.119 | f | 0.009 | F | 0.367 |
| 131 | D | g | 0.078 | g | 0.007 | g | 0.136 |
| 132 | G | a | 0.002 | a | 0.001 | a | 0.005 |
| 133 | W | b | 0 | a | 0.001 | a | 0.001 |
| 134 | N | b | 0.001 | b | 0.045 | b | 0.057 |
| 135 | G | c | 0.001 | c | 0.045 | c | 0.057 |
| 136 | H | d | 0.003 | d | 0.07 | d | 0.219 |
| 137 | S | e | 0.008 | e | 0.132 | e | 0.231 |
| 138 | R | f | 0.025 | f | 0.357 | F | 0.231 |
| 139 | E | g | 0.025 | g | 0.357 | g | 0.231 |
| 140 | K | a | 0.025 | a | 0.357 | a | 0.231 |
| 141 | I | b | 0.028 | b | 0.357 | b | 0.231 |
| 142 | K | c | 0.07 | c | 0.357 | c | 0.462 |
| 143 | P | d | 0.07 | d | 0.357 | d | 0.462 |
| 144 | E | e | 0.998 | e | 0.997 | e | 0.974 |
| 145 | K | f | 0.998 | f | 0.997 | f | 0.974 |
| 146 | E | g | 0.998 | g | 0.997 | g | 0.974 |
| 147 | L | a | 0.998 | a | 0.997 | a | 0.974 |
| 148 | Q | b | 0.998 | b | 0.997 | b | 0.974 |
| 149 | R | c | 0.998 | c | 0.997 | c | 0.974 |
| 150 | A | d | 0.998 | d | 0.997 | d | 0.974 |
| 151 | K | e | 0.998 | e | 0.997 | e | 0.974 |
| 152 | K | f | 0.998 | f | 0.997 | f | 0.974 |
| 153 | Q | g | 0.998 | g | 0.997 | g | 0.974 |
| 154 | I | a | 0.998 | a | 0.997 | a | 0.974 |
| 155 | M | b | 0.998 | b | 0.997 | b | 0.974 |
| 156 | K | c | 0.998 | c | 0.997 | c | 0.974 |
| 157 | Y | d | 0.998 | d | 0.997 | d | 0.974 |
| 158 | K | e | 0.989 | e | 0.997 | e | 0.974 |
| 159 | I | f | 0.896 | f | 0.997 | f | 0.974 |
| 160 | A | g | 0.486 | g | 0.997 | g | 0.974 |
| 161 | I | a | 0.409 | a | 0.997 | a | 0.974 |
| 162 | R | b | 0.274 | b | 0.997 | b | 0.974 |
| 163 | D | c | 0.255 | c | 0.997 | c | 0.974 |
| 164 | V | d | 0.095 | d | 0.997 | d | 0.974 |
| 165 | I | e | 0.025 | e | 0.871 | e | 0.974 |
| 166 | H | f | 0.025 | f | 0.622 | f | 0.974 |
| 167 | Q | g | 0.025 | g | 0.496 | g | 0.974 |
| 168 | L | a | 0.025 | a | 0.496 | a | 0.974 |
| 169 | D | b | 0.025 | b | 0.468 | b | 0.974 |
| 170 | L | c | 0.005 | c | 0.111 | c | 0.974 |
| 171 | C | d | 0.002 | d | 0.02 | d | 0.974 |
| 172 | S | e | 0.001 | e | 0.007 | e | 0.719 |
| 173 | S | f | 0.001 | f | 0.003 | f | 0.482 |
| 174 | S | g | 0.001 | g | 0.001 | g | 0.066 |
| 175 | G | a | 0 | a | 0 | a | 0.001 |

[1238] Another coiled coil is predicted in the C-terminal half of the PHDf-HD polypeptide as represented by SEQ ID NO: 180, with a lower probability than the two coiled domains comprised in the N-terminal half of the polypeptide.

### Example 34

### Subcellular Localisation Prediction of the Polypeptide Sequences Useful in Performing the Methods of the Invention

[1239] LOCtree is an algorithm that can predict the subcellular localization and DNA-binding propensity of non-membrane proteins in non-plant and plant eukaryotes as well as prokaryotes. LOCtree classifies eukaryotic animal proteins into one of five subcellular classes, while plant proteins are classified into one of six classes and prokaryotic proteins are classified into one of three classes.

[1240] Whenever available, LOCtree also reports predictions based on the following: 1) Nuclear localization signals found by the PredictNLS algorithm, 2) Localization inferred using Prosite motifs and Pfam domains found in the protein, and 3) SWISS-PROT keywords associated with a protein. Localization is inferred in the last two cases using the entropy-based LOCkey algorithm. The software is hosted at the University of Columbia, USA.

[1241] Motif and keyword based prediction of subcellular localization of a PHDf-HD polypeptide as represented by SEQ ID NO: 180, using LOCkey:

| Predicted | | Alternative | SWISS-PROT keywords used |
|---|---|---|---|
| Localization | Confidence | prediction | to assign localization |
| Nuclear | 100 | — | Homeobox, DNA-binding, |
| | | | Transcription regulation, Nuclear |
| | | | protein, Transcription, Zinc-finger |

[1242] Prediction of a nuclear localisation signal (NLS) is done using PredictNLS algorithm, for example. The algorithm is also hosted by the server at the University of Columbia, USA. In the Table below, prediction of NLS on the polypeptide of SEQ ID NO: 180 using the PredictNLS algorithm, is shown.

| Generalized motif | Hit on | |
|---|---|---|
| ([KR]{3,5} between | polypeptide | Coordinates on |
| 3 and 5 times | of SEQ ID | polypeptide of |
| K or R) | NO: 180 | SEQ ID NO: 180 |
| K[RK]{3,5}x{11,18} | KRRRGSDAATGKSA | 71-95 |
| [RK]Kx{2,3}K | TGPTRRKHKQK | |
| [KR]{4}x{20,24}K | KRRRGSDAATGKSA | 71-97 |
| {1,4}xK | TGPTRRKHKQKRK | |

[1243] In the polypeptide sequence below (SEQ ID NO: 180), the position of the predicted NLS is shown in bold and underlined twice:

MNTPEKKPLCYTSRRALQQRTESSSELISVSKRATRQNTPRKPDSPPKRTTRSSANLAKC

[chemical structure]

EQNLLDAYSGDGWNGHSREKIKPEKELQRAKKQIMKYKIAIRDVIHQLDLCSSSGSKDDS
VIPPDGCHESVNPEHTICSRCKSHESFPDNNIIFCEGGCKLACHQKCLEPPFDKILPTTR
HGRLCKHCSSKMKILDAINAHLGTSFTVKCPSSDIFKEAAEHENSDDGLGQDWLSEYSGD
EDYDPEENEASSSGEENKSADSNCSGSPLYSPNDDIPDFISADFNDAEGFCRESSNLGID
FGEDGLAEILTHQRPRRDVDYTQLNEQMFGEPIGNDEQSEDEDWGLNKRKKRRTGSTGVG
TNSVEGRSDVKSNKKAQPRRKLFRIPPAAVEVLRKAFAENELPARSVKENLSTELGISFE
KIDKWFKNTRCAALRDRKGESRYSGPSKRSRTSIEKAETSAKVDQMDNSCFLPLSEIINV
PTRLQKGLDKKPKSINSPPRPQDNETCLSPTDKTKEGTPPTIKPSITDSSQLMNNDIGTE
ETAVSWVDTWASDALHFLDVSDDEHFEDVIEKVCGLENRLQRLKENMLSSSSSTDNNVAA
ESGLQNEVVLVPAAELKDKAS

[1244] Many other algorithms can be used to perform such analyses, including:
[1245] ChloroP 1.1 hosted on the server of the Technical University of Denmark;
[1246] Protein Prowler Subcellular Localisation Predictor version 1.2 hosted on the server of the Institute for Molecular Bioscience, University of Queensland, Brisbane, Australia;
[1247] PENCE Proteome Analyst PA-GOSUB 2.5 hosted on the server of the University of Alberta, Edmonton, Alberta, Canada;
[1248] TMHMM, hosted on the server of the Technical University of Denmark

### Example 35

### Cloning of Nucleic Acid Sequence as Represented by SEQ ID NO: 179

[1249] Unless otherwise stated, recombinant DNA techniques were performed according to standard protocols described in (Sambrook (2001) Molecular Cloning: a laboratory manual, 3rd Edition Cold Spring Harbor Laboratory Press, CSH, New York) or in Volumes 1 and 2 of Ausubel et al. (1994), Current Protocols in Molecular Biology, Current Protocols. Standard materials and methods for plant molecular work are described in Plant Molecular Biology Labfax (1993) by R. D. D. Croy, published by BIOS Scientific Publications Ltd (UK) and Blackwell Scientific Publications (UK).

[1250] The Oryza sativa PHDf-HD gene was amplified by PCR using as template a rice cDNA bank synthesized from mRNA extracted from mixed plant tissues. Primer prm09687 (SEQ ID NO: 236; sense: 5′-ggggacaagtttgtacaaaaaagcaggcttaaacaatgaataccccagaaaa gaaa-3′) and primer prm09688 SEQ ID NO: 237; reverse, complementary: 5′-ggggaccactttgtacaagaaagctgggtgatgcaaggttaagatgcttt-3′), which include the AttB sites for Gateway recombination, were used for PCR amplification. PCR was performed using Hifi Taq DNA polymerase in standard conditions. A PCR fragment of the expected length (including attB sites) was amplified and purified also using standard methods. The first step of the Gateway procedure, the BP reaction, was then performed, during which the PCR fragment recombined in vivo with the pDONR201 plasmid to produce, according to the Gateway terminology, an “entry clone”. Plasmid pDONR201 was purchased from Invitrogen, as part of the Gateway® technology.

### Example 36

### Expression Vector Construction Using the Nucleic Acid Sequence as Represented by SEQ ID NO: 179

[1251] The entry clone comprising SEQ ID NO: 179 was subsequently used in an LR reaction with a destination vector used for Oryza sativa transformation. This vector contained as functional elements within the T-DNA borders: a plant selectable marker; a screenable marker expression cassette; and a Gateway cassette intended for LR in vivo recombination with the nucleic acid sequence of interest already cloned in the entry clone. A rice GOS2 promoter (SEQ ID NO: 235) for constitutive expression was located upstream of this Gateway cassette.

[1252] After the LR recombination step, the resulting expression vector pGOS2::PHDf-HD and (FIG. 18) was transformed into Agrobacterium strain LBA4044 according to methods well known in the art.

### Example 37

### Plant Transformation

### Rice Transformation

[1253] The Agrobacterium containing the expression vectors were used independently to transform Oryza sativa plants. Mature dry seeds of the rice japonica cultivar Nipponbare were dehusked. Sterilization was carried out by incubating for one minute in 70% ethanol, followed by 30 minutes in 0.2% HgCl₂, followed by a 6 times 15 minutes wash with sterile distilled water. The sterile seeds were then germinated on a medium containing 2,4-D (callus induction medium). After incubation in the dark for four weeks, embryogenic, scutellum-derived calli were excised and propagated on the same medium. After two weeks, the calli were multiplied or propagated by subculture on the same medium for another 2 weeks. Embryogenic callus pieces were sub-cultured on fresh medium 3 days before co-cultivation (to boost cell division activity).

[1254] Agrobacterium strain LBA4404 containing each individual expression vector was used independently for co-cultivation. Agrobacterium was inoculated on AB medium with the appropriate antibiotics and cultured for 3 days at 28° C. The bacteria were then collected and suspended in liquid co-cultivation medium to a density (OD₆₀₀) of about 1. The suspension was then transferred to a Petri dish and the calli immersed in the suspension for 15 minutes. The callus tissues were then blotted dry on a filter paper and transferred to solidified, co-cultivation medium and incubated for 3 days in the dark at 25° C. Co-cultivated calli were grown on 2,4-D-containing medium for 4 weeks in the dark at 28° C. in the presence of a selection agent. During this period, rapidly growing resistant callus islands developed. After transfer of this material to a regeneration medium and incubation in the light, the embryogenic potential was released and shoots developed in the next four to five weeks. Shoots were excised from the calli and incubated for 2 to 3 weeks on an auxin-containing medium from which they were transferred to soil. Hardened shoots were grown under high humidity and short days in a greenhouse.

[1255] Approximately 35 independent T0 rice transformants were generated for each construct. The primary transformants were transferred from a tissue culture chamber to a greenhouse. After a quantitative PCR analysis to verify copy number of the T-DNA insert, only single copy transgenic plants that exhibit tolerance to the selection agent were kept for harvest of T1 seed. Seeds were then harvested three to five months after transplanting. The method yielded single locus transformants at a rate of over 50% (Aldemita and Hodges1996, Chan et al. 1993, Hiei et al. 1994).

### Example 38

### Phenotypic Evaluation Procedure

### 38.1 Evaluation Setup

[1256] Approximately 35 independent T0 rice transformants were generated. The primary transformants were transferred from a tissue culture chamber to a greenhouse for growing and harvest of T1 seed. Six events, of which the T1 progeny segregated 3:1 for presence/absence of the transgene, were retained. For each of these events, approximately 10 T1 seedlings containing the transgene (hetero- and homo-zygotes) and approximately 10 T1 seedlings lacking the transgene (nullizygotes) were selected by monitoring visual marker expression.

[1257] The transgenic plants and the corresponding nullizygotes were grown side-by-side at random positions. Greenhouse conditions were of shorts days (12 hours light), 28° C. in the light and 22° C. in the dark, and a relative humidity of 70%. Plants grown under non-stress conditions are supplied with water at regular intervals to ensure that water and nutrients are not limiting to satisfy plant needs to complete growth and development.

[1258] From the stage of sowing until the stage of maturity the plants were passed several times through a digital imaging cabinet. At each time point digital images (2048×1536 pixels, 16 million colours) were taken of each plant from at least 6 different angles.

### 38.2 Statistical Analysis: F-Test

[1259] A two factor ANOVA (analysis of variants) was used as a statistical model for the overall evaluation of plant phenotypic characteristics. An F-test was carried out on all the parameters measured of all the plants of all the events transformed with the gene of the present invention. The F-test was carried out to check for an effect of the gene over all the transformation events and to verify for an overall effect of the gene, also known as a global gene effect. The threshold for significance for a true global gene effect was set at a 5% probability level for the F-test. A significant F-test value points to a gene effect, meaning that it is not only the mere presence or position of the gene that is causing the differences in phenotype.

### 38.3 Parameters Measured

### Biomass-Related Parameter Measurement

[1260] From the stage of sowing until the stage of maturity the plants were passed several times through a digital imaging cabinet. At each time point digital images (2048×1536 pixels, 16 million colours) were taken of each plant from at least 6 different angles.

[1261] The plant aboveground area (or leafy biomass) was determined by counting the total number of pixels on the digital images from aboveground plant parts discriminated from the background. This value was averaged for the pictures taken on the same time point from the different angles and was converted to a physical surface value expressed in square mm by calibration. Experiments show that the aboveground plant area measured this way correlates with the biomass of plant parts above ground. The above ground area is the area measured at the time point at which the plant had reached its maximal leafy biomass. The early vigour is the plant (seedling) aboveground area three weeks post-germination. Increase in root biomass is expressed as an increase in total root biomass (measured as maximum biomass of roots observed during the lifespan of a plant); or as an increase in the root/shoot index (measured as the ratio between root mass and shoot mass in the period of active growth of root and shoot).

### Seed-Related Parameter Measurements

[1262] The mature primary panicles were harvested, counted, bagged, barcode-labelled and then dried for three days in an oven at 37° C. The panicles were then threshed and all the seeds were collected and counted. The filled husks were separated from the empty ones using an air-blowing device. The empty husks were discarded and the remaining fraction was counted again. The filled husks were weighed on an analytical balance. The number of filled seeds was determined by counting the number of filled husks that remained after the separation step. The total seed weight per plant was measured by weighing all filled husks harvested from one plant. Total seed number per plant was measured by counting the number of husks harvested from a plant. Thousand Kernel Weight (TKW) is extrapolated from the number of filled seeds counted and their total weight. The Harvest Index (HI) in the present invention is defined as the ratio between the total seed weight per plant and the above ground area (mm²), multiplied by a factor 10⁶. The total number of flowers per panicle as defined in the present invention is the ratio between the total number of seeds and the number of mature primary panicles. The seed fill rate as defined in the present invention is the proportion (expressed as a %) of the number of filled seeds over the total number of seeds (or florets).

### Reduced Nutrient (Nitrogen) Availability Screen

[1263] Rice plants from T2 seeds were grown in potting soil under normal conditions except for the nutrient solution. The pots were watered from transplantation to maturation with a specific nutrient solution containing reduced N nitrogen (N) content, usually between 7 to 8 times less. The rest of the cultivation (plant maturation, seed harvest) was the same as for plants not grown under abiotic stress. Growth and yield parameters were recorded as detailed for growth under normal conditions.

### Example 39

### Results of the Phenotypic Evaluation of the Transgenic Rice Plants

[1264] The results of the evaluation of transgenic rice plants expressing the nucleic acid sequence encoding a PHDf-HD polypeptide as represented by SEQ ID NO: 180, under the control of the GOS2 promoter for constitutive expression, are presented below.

[1265] There was a significant increase in the number of panicles, in the total seed yield per plant, in the total number of filled seeds, in the total number of seeds, in the Thousand Kernel Weight (TKW), and in the harvest index of the transgenic plants compared to corresponding nullizygotes (controls), as shown in Table D7.

TABLE D7
Results of the evaluation of transgenic rice plants expressing the nucleic
acid sequence encoding a PHDf-HD polypeptide as represented by SEQ ID
NO: 180, under the control of the GOS2 promoter for constitutive expression.

| | Average % increase in 3 |
|---|---|
| | events in the T1 generation |
| Number of first panicles | 22% |
| Total seed yield per plant | 30% |
| Total number of filled seeds | 24% |
| Total number of seeds | 24% |
| TKW | 4% |
| Harvest index | 17% |

### Example 40

### Results of the Phenotypic Evaluation of the Transgenic Rice Plants Grown Under Reduced Nutrient Availability

[1266] The results of the evaluation of transgenic rice plants expressing the nucleic acid sequence encoding a PHDf-HD polypeptide as represented by SEQ ID NO: 180, under the control of the GOS2 promoter for constitutive expression, and grown under reduced nutrient availability, are presented below.

[1267] There was a significant increase in biomass, in emergeance vigor, in the total seed yield per plant, in the total number of filled seeds, in the seed filling rate, in the total number of seeds, in the Thousand Kernel Weight (TKW), and in the harvest index of the transgenic plants compared to corresponding nullizygotes (controls), as shown in Table D8.

TABLE D8
Results of the evaluation of transgenic rice plants expressing the nucleic
acid sequence encoding a PHDf-HD polypeptide as represented by SEQ
ID NO: 180, under the control of the GOS2 promoter for constitutive
expression, and grown under reduced nutrient availability.

| | Overall average % increase |
|---|---|
| | (6 events in the T2 generation) |
| Biomass | 8% |
| Emergeance vigor | 20% |
| Total seed yield per plant | 17% |
| Total number of filled seeds | 12% |
| Seed filling rate | 3% |
| Total number of seeds | 9% |
| TKW | 5% |
| Harvest index | 9% |

### Example 41

### Examples of Transformation of Other Crops

[1268] Transformation of corn, wheat, soybean, rapeseed/canola, alfalfa and cotton was carried out as outlined in Example 7

### Example 42

### Examples of Abiotic Stress Screens

### Drought Screen

[1269] Plants from a selected number of events are grown in potting soil under normal conditions until they approached the heading stage. They are then transferred to a “dry” section where irrigation is withheld. Humidity probes are inserted in randomly chosen pots to monitor the soil water content (SWC). When SWC go below certain thresholds, the plants are automatically re-watered continuously until a normal level is reached again. The plants are then re-transferred to normal conditions. The rest of the cultivation (plant maturation, seed harvest) is the same as for plants not grown under abiotic stress conditions. Growth and yield parameters are recorded as detailed for growth under normal conditions.

### Salt Stress Screen

[1270] Plants are grown on a substrate made of coco fibers and argex (3 to 1 ratio). A normal nutrient solution is used during the first two weeks after transplanting the plantlets in the greenhouse. After the first two weeks, 25 mM of salt (NaCl) is added to the nutrient solution, until the plants were harvested. Growth and yield parameters are recorded as detailed for growth under normal conditions.

### VIII. bHLH11-Like (Basic Helix-Loop-Helix 11) Protein

### Example 43

### Identification of Sequences Related to the bHLH11-Like Nucleic Acid Sequence Used in the Methods of the Invention

[1271] Sequences (full length cDNA, ESTs or genomic) related to the nucleic acid sequence used in the methods of the present invention were identified amongst those maintained in the Entrez Nucleotides database at the National Center for Biotechnology Information (NCBI) using database sequence search tools, such as the Basic Local Alignment Tool (BLAST) (Altschul et al. (1990) J. Mol. Biol. 215:403-410; and Altschul et al. (1997) Nucleic Acids Res. 25:3389-3402). The program is used to find regions of local similarity between sequences by comparing nucleic acid or polypeptide sequences to sequence databases and by calculating the statistical significance of matches. For example, the polypeptide encoded by the nucleic acid used in the present invention was used for the TBLASTN algorithm, with default settings and the filter to ignore low complexity sequences set off. The output of the analysis was viewed by pairwise comparison, and ranked according to the probability score (E-value), where the score reflect the probability that a particular alignment occurs by chance (the lower the E-value, the more significant the hit). In addition to E-values, comparisons were also scored by percentage identity. Percentage identity refers to the number of identical nucleotides (or amino acids) between the two compared nucleic acid (or polypeptide) sequences over a particular length. In some instances, the default parameters may be adjusted to modify the stringency of the search. For example the E-value may be increased to show less stringent matches. This way, short nearly exact matches may be identified. Table E1 provides a list of nucleic acid sequences related to the nucleic acid sequence used in the methods of the present invention.

TABLE E1
Examplesof bHLH11-like polypeptides:

| | Protein | Nucleic acid |
|---|---|---|
| Plant Source | SEQ ID NO: | SEQ ID NO: |
| Triticum aestivum | 244 | 245 |
| Allium cepa | 258 | 327 |
| Arabidopsis thaliana | 259 | 328 |
| Arabidopsis thaliana | 260 | 329 |
| Arabidopsis thaliana | 261 | 330 |
| Arabidopsis thaliana | 262 | 331 |
| Arabidopsis thaliana | 263 | 332 |
| Aquilegia vulgaris | 264 | 333 |
| Aquilegia vulgaris | 265 | 334 |
| Brassica napus | 266 | 335 |
| Citrus clementina | 267 | 336 |
| Curcuma longa | 268 | 337 |
| Citrus paridisi hybrid | 269 | 338 |
| Citrus sinensis | 270 | 339 |
| Eucalyptus grandis | 271 | 340 |
| Eucalyptus grandis | 272 | 341 |
| Gossypium hirsutum | 273 | 342 |
| Gossypium hirsutum | 274 | 343 |
| Gossypium hirsutum | 275 | 344 |
| Gossypium hirsutum | 276 | 345 |
| Gossypium hirsutum | 277 | 346 |
| Gossypium hirsutum | 278 | 347 |
| Glycine max | 279 | 348 |
| Glycine max | 280 | 349 |
| Glycine max | 281 | 350 |
| Glycine max | 282 | 351 |
| Gossypium raimondii | 283 | 352 |
| Helianthus petiolaris | 284 | 353 |
| Hordeum vulgare | 285 | 354 |
| Lactuca perennis | 286 | 355 |
| Nicotiana benthamiana | 287 | 356 |
| Nicotiana benthamiana | 288 | 357 |
| Nicotiana benthamiana | 289 | 358 |
| Nicotiana benthamiana | 290 | 359 |
| Nicotiana tabacum | 291 | 360 |
| Oryza sativa | 292 | 361 |
| Oryza sativa | 293 | 362 |
| Oryza sativa | 294 | 363 |
| Oryza sativa | 295 | 364 |
| Oryza sativa | 296 | 365 |
| Oryza sativa | 297 | 366 |
| Oryza sativa | 298 | 367 |
| Picea abies | 299 | 368 |
| Populus deltoides | 300 | 369 |
| Pinus radiata | 301 | 370 |
| Picea sitchensis | 302 | 371 |
| Pinus taeda | 303 | 372 |
| Populus trichocarpa | 304 | 373 |
| Populus trichocarpa | 305 | 374 |
| Populus trichocarpa | 306 | 375 |
| Populus trichocarpa | 307 | 376 |
| Populus trichocarpa | 308 | 377 |
| Poncirus trifoliata | 309 | 378 |
| Ricinus communis | 310 | 379 |
| Ricinus communis | 311 | 380 |
| Sorghum bicolor | 312 | 381 |
| Solanum lycopersicum | 313 | 382 |
| Solanum lycopersicum | 314 | 383 |
| Solanum lycopersicum | 315 | 384 |
| Solanum tuberosum | 316 | 385 |
| Solanum tuberosum | 317 | 386 |
| Solanum tuberosum | 318 | 387 |
| Solanum tuberosum | 319 | 388 |
| Triticum aestivum | 320 | 389 |
| Vitis vinifera | 321 | 390 |
| Vitis vinifera | 322 | 391 |
| Vitis vinifera | 323 | 392 |
| Vitis vinifera | 324 | 393 |
| Zea mays | 325 | 394 |
| Zea mays | 326 | 395 |

[1272] In some instances, related sequences have tentatively been assembled and publicly disclosed by research institutions, such as The Institute for Genomic Research (TIGR). The Eukaryotic Gene Orthologs (EGO) database may be used to identify such related sequences, either by keyword search or by using the BLAST algorithm with the nucleic acid or polypeptide sequence of interest.

### Example 44

### Alignment of bHLH11-Like Polypeptide Sequences

[1273] Alignment of polypeptide sequences was performed using the AlignX programme from the Vector NTI (Invitrogen) which is based on the popular Clustal W algorithm of progressive alignment (Thompson et al. (1997) Nucleic Acids Res 25:4876-4882; Chenna et al. (2003). Nucleic Acids Res 31:3497-3500). Default values are for the gap open penalty of 10, for the gap extension penalty of 0.1 and the selected weight matrix is Blosum 62 (if polypeptides are aligned). Minor manual editing was done to further optimise the alignment. Sequence conservation among bHLH11-like polypeptides is essentially in the C-terminal bHLH domain of the polypeptides, the N-terminal domain usually being more variable in sequence length and composition. The bHLH11-like polypeptides are aligned in FIG. 21.

[1274] A phylogenetic tree of bHLH11-like polypeptides (FIG. 22) was constructed using “CLUSTALX”, and a neighbour-joining tree was calculated. The circular cladogram was drawn using Dendroscope (Huson et al., 2007).

### Example 45

### Calculation of Global Percentage Identity Between Polypeptide Sequences Useful in Performing the Methods of the Invention

[1275] Global percentages of similarity and identity between full length polypeptide sequences useful in performing the methods of the invention were determined using one of the methods available in the art, the MatGAT (Matrix Global Alignment Tool) software (BMC Bioinformatics. 2003 4:29. MatGAT: an application that generates similarity/identity matrices using protein or DNA sequences. Campanella J J, Bitincka L, Smalley J; software hosted by Ledion Bitincka). MatGAT software generates similarity/identity matrices for DNA or protein sequences without needing pre-alignment of the data. The program performs a series of pair-wise alignments using the Myers and Miller global alignment algorithm (with a gap opening penalty of 12, and a gap extension penalty of 2), calculates similarity and identity using for example Blosum 62 (for polypeptides), and then places the results in a distance matrix. Sequence similarity is shown in the bottom half of the dividing line and sequence identity is shown in the top half of the diagonal dividing line.

[1276] Parameters used in the comparison were:
[1277] Scoring matrix: Blosum62
[1278] First Gap: 12
[1279] Extending gap: 2

[1280] Results of the software analysis are shown in Table E2 for the global similarity and identity over the full length of the polypeptide sequences. Percentage identity is given above the diagonal and percentage similarity is given below the diagonal. SEQ ID NO: 245 is represented as TabHLH11.

[1281] The percentage identity between the bHLH11-like polypeptide sequences useful in performing the methods of the invention can be as low as 20% amino acid identity compared to SEQ ID NO: 245. The identity is however much higher when the HLH domains are compared (Table E3).

TABLE E2
MatGAT results for global similarity and identity over the full length of
the bHLH11-like polypeptide sequences.

| | 1 | 2 | 3 | 4 | 5 | 6 | 7 | 8 | 9 | 10 |
|---|---|---|---|---|---|---|---|---|---|---|
| 1. TC3698 | | 51.1 | 53.5 | 15.9 | 39.5 | 37.1 | 49.4 | 19.5 | 53.8 | 45.8 |
| 2. AT1G03040 | 63.2 | | 81.0 | 16.3 | 37.8 | 36.3 | 52.4 | 19.9 | 72.3 | 40.5 |
| 3. AT4G02590 | 64.2 | 89.0 | | 17.0 | 37.0 | 35.1 | 55.2 | 18.8 | 82.4 | 43.0 |
| 4. AT2G24260 | 21.7 | 22.0 | 22.3 | | 27.7 | 19.7 | 16.4 | 12.7 | 15.6 | 17.0 |
| 5. AT4G30980 | 53.2 | 53.9 | 52.6 | 30.6 | | 46.4 | 36.0 | 22.0 | 35.5 | 38.7 |
| 6. AT5G58010 | 53.9 | 55.0 | 52.6 | 23.8 | 58.1 | | 32.6 | 24.2 | 34.0 | 35.4 |
| 7. TC15501 | 58.4 | 64.1 | 65.5 | 22.1 | 49.9 | 48.1 | | 17.5 | 52.8 | 47.0 |
| 8. TC19278 | 31.9 | 31.1 | 30.0 | 15.6 | 33.2 | 35.0 | 26.8 | | 18.8 | 21.1 |
| 9. TC10015_part | 64.9 | 80.5 | 85.8 | 19.9 | 50.6 | 52.2 | 60.4 | 31.7 | | 41.9 |
| 10. DY268946 | 56.8 | 55.9 | 59.1 | 23.8 | 52.5 | 46.4 | 61.0 | 31.6 | 53.0 | |
| 11. TA2544 | 47.3 | 46.8 | 47.8 | 26.1 | 49.3 | 46.3 | 49.0 | 23.9 | 45.6 | 47.6 |
| 12. TA3392 | 68.1 | 76.8 | 79.4 | 21.7 | 51.9 | 52.2 | 63.0 | 32.7 | 84.0 | 56.2 |
| 13. TA12416 | 38.0 | 38.2 | 40.7 | 30.4 | 48.4 | 43.3 | 46.3 | 25.8 | 37.3 | 43.7 |
| 14. WO051050seqID77 | 61.3 | 63.8 | 66.3 | 20.8 | 51.3 | 50.9 | 66.4 | 28.1 | 61.9 | 65.8 |
| 15. WO051050seqID1671 | 56.9 | 70.5 | 74.9 | 22.3 | 46.5 | 47.1 | 70.9 | 27.5 | 68.5 | 59.0 |
| 16. TA55042 | 62.5 | 59.5 | 62.8 | 22.4 | 51.7 | 52.0 | 65.8 | 27.8 | 58.0 | 67.0 |
| 17. TC207545 | 60.7 | 66.6 | 68.1 | 20.1 | 51.0 | 51.5 | 57.0 | 38.5 | 71.6 | 53.9 |
| 18. TA13791 | 63.7 | 80.5 | 82.6 | 22.1 | 52.6 | 54.8 | 68.1 | 31.7 | 78.2 | 59.4 |
| 19. CO123623 | 61.4 | 57.3 | 58.7 | 19.3 | 49.7 | 53.9 | 58.1 | 32.8 | 62.6 | 64.3 |
| 20. DT543504 | 52.0 | 55.2 | 54.8 | 22.3 | 51.3 | 52.6 | 47.3 | 37.9 | 49.7 | 50.4 |
| 21. TC60118 | 63.4 | 80.2 | 82.3 | 22.0 | 52.3 | 54.5 | 67.8 | 31.7 | 77.9 | 59.1 |
| 22. TC60119 | 65.1 | 78.9 | 82.9 | 21.1 | 51.9 | 53.3 | 67.0 | 30.6 | 77.3 | 58.6 |
| 23. TC61833 | 63.6 | 78.4 | 81.9 | 21.9 | 54.2 | 55.4 | 66.1 | 30.2 | 77.0 | 56.8 |
| 24. TC67603 | 40.3 | 43.3 | 42.4 | 28.8 | 48.7 | 45.9 | 47.5 | 26.9 | 40.7 | 45.7 |
| 25. TC229602 | 56.8 | 60.3 | 61.0 | 18.9 | 45.8 | 49.2 | 50.7 | 45.2 | 63.3 | 49.9 |
| 26. TC205173 | 50.4 | 51.0 | 48.7 | 25.3 | 58.5 | 54.6 | 53.3 | 34.3 | 47.2 | 52.5 |
| 27. TA1140 | 63.4 | 64.1 | 64.5 | 21.5 | 55.2 | 53.9 | 64.7 | 31.0 | 62.7 | 55.1 |
| 28. TC140470 | 37.6 | 38.5 | 38.0 | 26.6 | 35.8 | 36.4 | 41.2 | 22.2 | 34.9 | 37.0 |
| 29. TA3490_part | 67.6 | 64.6 | 64.2 | 22.0 | 53.2 | 54.5 | 62.1 | 32.4 | 65.2 | 58.0 |
| 30. CK293938 | 67.6 | 64.2 | 65.2 | 20.6 | 53.9 | 54.2 | 61.5 | 32.1 | 65.2 | 60.0 |
| 31. TC8633 | 64.6 | 78.8 | 79.0 | 22.5 | 53.9 | 56.3 | 68.1 | 31.8 | 74.5 | 56.5 |
| 32. TC7102 | 39.7 | 42.4 | 42.9 | 30.0 | 49.2 | 44.2 | 46.3 | 25.1 | 39.7 | 44.7 |
| 33. TC7103 | 45.0 | 46.0 | 46.3 | 26.7 | 53.2 | 51.2 | 48.8 | 27.9 | 45.0 | 46.5 |
| 34. TC12771 | 66.1 | 64.9 | 65.5 | 21.2 | 54.8 | 54.4 | 61.5 | 30.9 | 64.4 | 59.7 |
| 35. Os03g58330 | 67.7 | 61.9 | 61.3 | 21.3 | 53.9 | 54.2 | 58.7 | 32.7 | 62.6 | 55.9 |
| 36. Os06g08500 | 43.6 | 43.6 | 45.0 | 23.6 | 45.0 | 48.2 | 47.7 | 28.6 | 42.0 | 43.3 |
| 37. Os06g09370 | 37.7 | 37.4 | 38.1 | 26.8 | 35.1 | 34.1 | 40.0 | 22.2 | 34.1 | 40.6 |
| 38. Os02g55250 | 40.6 | 42.0 | 41.5 | 28.5 | 43.5 | 44.4 | 45.1 | 25.2 | 39.2 | 46.0 |
| 39. Os02g35660 | 35.7 | 35.1 | 36.6 | 29.2 | 36.5 | 34.4 | 39.3 | 22.9 | 33.6 | 38.5 |
| 40. Os07g08440 | 70.3 | 60.3 | 65.5 | 20.8 | 52.3 | 56.9 | 58.4 | 33.8 | 63.8 | 57.1 |
| 41. Os09g25040 | 37.3 | 35.7 | 38.5 | 30.0 | 40.1 | 38.5 | 41.5 | 24.4 | 36.1 | 38.7 |
| 42. Pt_scaff_II.416 | 62.7 | 79.5 | 81.9 | 22.4 | 53.5 | 53.7 | 66.7 | 31.3 | 78.7 | 58.3 |
| 43. Pt_scaff_70.65 | 60.7 | 62.2 | 65.9 | 21.9 | 52.3 | 49.2 | 65.8 | 27.5 | 60.7 | 69.9 |
| 44. Pt_scaff_XIII.403 | 59.9 | 62.0 | 62.3 | 21.2 | 50.6 | 49.7 | 66.1 | 28.1 | 58.7 | 67.0 |
| 45. Pt_scaff28.86 | 39.5 | 39.3 | 40.8 | 27.2 | 39.3 | 38.8 | 42.5 | 29.4 | 36.2 | 43.4 |
| 46. Pt_TC63334 | 65.0 | 79.8 | 81.6 | 22.1 | 54.8 | 52.3 | 68.7 | 31.3 | 78.7 | 58.0 |
| 47. TA14134 | 46.2 | 49.8 | 50.8 | 24.7 | 50.5 | 50.2 | 49.3 | 37.5 | 43.7 | 52.5 |
| 48. TA5414 | 38.0 | 38.5 | 41.2 | 30.1 | 48.5 | 42.7 | 45.9 | 25.9 | 37.8 | 42.9 |
| 49. TA3263 | 65.3 | 79.5 | 81.6 | 22.3 | 54.8 | 54.0 | 68.4 | 31.7 | 79.0 | 58.3 |
| 50. TA2825 | 65.2 | 80.1 | 83.9 | 22.0 | 53.2 | 54.2 | 66.7 | 32.1 | 80.3 | 55.9 |
| 51. TA1616 | 61.0 | 65.3 | 66.3 | 22.3 | 52.1 | 50.3 | 70.4 | 28.8 | 60.4 | 70.4 |
| 52. TA21665 | 66.2 | 65.2 | 63.9 | 21.3 | 52.3 | 53.2 | 60.4 | 31.1 | 63.5 | 58.3 |
| 53. TC172581 | 64.5 | 63.8 | 67.1 | 21.1 | 52.9 | 53.9 | 61.0 | 30.6 | 62.2 | 60.0 |
| 54. AK247217 | 64.6 | 80.5 | 80.3 | 22.9 | 52.3 | 52.0 | 70.1 | 31.5 | 75.2 | 56.2 |
| 55. TC104646 | 69.5 | 61.6 | 61.9 | 20.7 | 51.0 | 53.5 | 58.7 | 35.0 | 67.3 | 55.7 |
| 56. DV982110 | 59.3 | 55.6 | 53.5 | 22.6 | 55.8 | 57.9 | 51.0 | 38.0 | 55.8 | 51.3 |
| 57. WO051050seqID516 | 40.2 | 42.5 | 42.3 | 28.0 | 44.1 | 42.3 | 46.4 | 27.0 | 39.3 | 46.9 |
| 58. TC68930 | 48.3 | 49.2 | 49.5 | 25.9 | 49.5 | 53.5 | 47.0 | 38.4 | 45.6 | 51.3 |
| 59. TA30646 | 64.6 | 79.8 | 80.0 | 22.1 | 52.6 | 52.3 | 68.7 | 31.5 | 75.8 | 55.7 |
| 60. TA28621 | 65.8 | 64.1 | 67.1 | 21.3 | 53.2 | 52.3 | 61.5 | 30.3 | 62.8 | 60.9 |
| 61. TA34455 | 40.3 | 41.6 | 41.2 | 29.5 | 49.7 | 43.4 | 45.9 | 23.0 | 38.0 | 45.6 |
| 62. TA37666 | 45.5 | 46.6 | 48.7 | 27.4 | 53.9 | 48.2 | 51.8 | 28.3 | 43.7 | 50.3 |
| 63. TC253044 | 56.6 | 54.0 | 51.6 | 19.7 | 50.3 | 53.9 | 49.3 | 36.9 | 53.4 | 45.8 |
| 64. TabHLH11 | 71.2 | 60.9 | 61.0 | 19.9 | 50.6 | 56.6 | 57.0 | 34.2 | 66.2 | 55.9 |
| 65. TA46156 | 67.5 | 76.8 | 78.4 | 22.3 | 54.8 | 55.2 | 66.4 | 33.6 | 78.9 | 58.6 |
| 66. GSVIVT00017237001 | 43.5 | 42.1 | 43.1 | 29.4 | 48.1 | 45.2 | 47.4 | 27.5 | 40.4 | 47.8 |
| 67. TA46194 | 66.1 | 69.0 | 71.9 | 22.3 | 52.1 | 53.4 | 70.9 | 29.7 | 67.4 | 63.5 |
| 68. GSVIVT00016367001 | 35.7 | 37.7 | 36.5 | 24.5 | 38.1 | 36.9 | 41.6 | 24.1 | 34.4 | 41.9 |
| 69. TA139285 | 70.2 | 59.9 | 61.3 | 20.3 | 51.6 | 56.2 | 59.5 | 34.4 | 62.1 | 58.0 |
| 70. TA126400 | 69.5 | 61.9 | 62.6 | 20.9 | 54.5 | 52.5 | 57.3 | 34.0 | 66.7 | 56.8 |
| | 11 | 12 | 13 | 14 | 15 | 16 | 17 | 18 | 19 | 20 |
| 1. TC3698 | 36.3 | 53.7 | 30.6 | 52.0 | 46.5 | 51.0 | 52.2 | 51.7 | 51.2 | 34.6 |
| 2. AT1G03040 | 35.9 | 64.6 | 31.1 | 50.7 | 59.5 | 45.9 | 58.4 | 68.1 | 45.3 | 37.0 |
| 3. AT4G02590 | 35.4 | 69.5 | 33.8 | 53.5 | 64.6 | 47.6 | 62.6 | 72.6 | 47.0 | 36.4 |
| 4. AT2G24260 | 19.0 | 15.8 | 23.0 | 15.8 | 15.8 | 16.8 | 15.9 | 16.8 | 15.4 | 17.2 |
| 5. AT4G30980 | 40.6 | 35.1 | 41.3 | 36.3 | 32.6 | 36.2 | 37.7 | 36.1 | 37.4 | 37.2 |
| 6. AT5G58010 | 37.1 | 36.0 | 35.7 | 31.6 | 32.3 | 35.5 | 38.8 | 36.0 | 38.1 | 39.2 |
| 7. TC15501 | 37.0 | 56.0 | 35.1 | 57.8 | 59.2 | 52.8 | 52.4 | 60.9 | 51.0 | 31.4 |
| 8. TC19278 | 16.4 | 19.5 | 18.9 | 17.8 | 17.6 | 17.5 | 23.0 | 20.2 | 19.4 | 27.6 |
| 9. TC10015_part | 35.6 | 72.5 | 30.8 | 52.5 | 59.7 | 47.1 | 61.4 | 68.0 | 51.4 | 35.2 |
| 10. DY268946 | 34.5 | 42.7 | 32.9 | 52.7 | 43.2 | 50.8 | 46.9 | 45.0 | 57.6 | 35.6 |
| 11. TA2544 | | 35.0 | 44.9 | 38.4 | 35.9 | 36.4 | 33.4 | 36.1 | 34.6 | 31.1 |
| 12. TA3392 | 43.7 | | 30.9 | 53.0 | 68.7 | 49.4 | 63.1 | 77.0 | 52.2 | 36.8 |
| 13. TA12416 | 54.6 | 40.3 | | 32.2 | 32.4 | 33.1 | 29.7 | 33.3 | 32.1 | 31.3 |
| 14. WO051050seqID77 | 45.4 | 61.3 | 39.4 | | 53.2 | 58.7 | 50.0 | 54.6 | 58.1 | 31.5 |
| 15. WO051050seqID1671 | 47.3 | 75.4 | 42.0 | 64.5 | | 46.8 | 58.7 | 71.0 | 44.8 | 33.5 |
| 16. TA55042 | 48.8 | 58.9 | 42.4 | 69.2 | 62.7 | | 48.1 | 48.6 | 58.1 | 33.8 |
| 17. TC207545 | 42.9 | 74.7 | 36.7 | 56.9 | 64.5 | 56.8 | | 64.7 | 56.0 | 37.4 |
| 18. TA13791 | 48.3 | 83.5 | 43.1 | 65.0 | 78.0 | 63.1 | 71.6 | | 50.6 | 35.4 |
| 19. CO123623 | 42.9 | 65.1 | 38.2 | 65.6 | 55.2 | 65.6 | 64.9 | 61.7 | | 36.8 |
| 20. DT543504 | 42.7 | 55.2 | 39.7 | 51.9 | 51.4 | 50.5 | 52.6 | 54.9 | 50.0 | |
| 21. TC60118 | 48.0 | 83.2 | 42.9 | 64.7 | 77.7 | 62.8 | 71.3 | 99.7 | 60.7 | 55.2 |
| 22. TC60119 | 47.6 | 82.6 | 40.5 | 65.6 | 76.6 | 60.7 | 71.1 | 91.1 | 58.6 | 53.6 |
| 23. TC61833 | 47.6 | 82.3 | 40.7 | 65.0 | 76.9 | 62.5 | 71.1 | 90.8 | 56.4 | 54.9 |
| 24. TC67603 | 56.7 | 42.9 | 67.0 | 43.1 | 42.9 | 45.7 | 38.6 | 42.9 | 40.0 | 41.2 |
| 25. TC229602 | 38.0 | 65.1 | 33.5 | 52.5 | 57.5 | 52.3 | 81.1 | 65.3 | 61.9 | 46.1 |
| 26. TC205173 | 52.2 | 47.5 | 54.6 | 51.3 | 48.0 | 54.6 | 49.0 | 51.0 | 49.6 | 49.9 |
| 27. TA1140 | 45.1 | 63.1 | 42.2 | 65.3 | 60.1 | 64.0 | 61.1 | 66.0 | 62.4 | 53.9 |
| 28. TC140470 | 43.7 | 37.4 | 48.0 | 38.0 | 40.3 | 40.3 | 33.5 | 37.8 | 32.8 | 43.9 |
| 29. TA3490_part | 45.6 | 67.9 | 41.4 | 63.4 | 59.5 | 63.4 | 63.1 | 68.6 | 63.1 | 52.6 |
| 30. CK293938 | 45.6 | 66.2 | 41.4 | 68.4 | 60.1 | 64.0 | 59.8 | 66.0 | 64.9 | 53.6 |
| 31. TC8633 | 45.1 | 75.5 | 41.8 | 65.3 | 71.1 | 62.5 | 69.9 | 80.9 | 59.3 | 54.9 |
| 32. TC7102 | 56.9 | 40.6 | 69.7 | 43.6 | 44.2 | 43.6 | 38.1 | 44.2 | 39.3 | 41.3 |
| 33. TC7103 | 57.1 | 45.2 | 65.0 | 46.3 | 50.4 | 49.4 | 42.9 | 49.1 | 41.6 | 45.5 |
| 34. TC12771 | 45.6 | 65.1 | 40.9 | 67.2 | 59.8 | 64.0 | 59.7 | 66.0 | 65.8 | 54.9 |
| 35. Os03g58330 | 45.4 | 61.6 | 39.2 | 62.2 | 53.8 | 61.9 | 59.2 | 63.7 | 62.9 | 51.3 |
| 36. Os06g08500 | 51.5 | 44.1 | 46.5 | 44.1 | 45.2 | 46.6 | 40.3 | 43.3 | 39.0 | 43.3 |
| 37. Os06g09370 | 44.1 | 38.5 | 44.4 | 38.5 | 40.6 | 42.7 | 33.1 | 38.9 | 36.2 | 40.8 |
| 38. Os02g55250 | 55.8 | 40.8 | 56.3 | 44.0 | 41.7 | 46.3 | 38.1 | 41.5 | 39.0 | 43.5 |
| 39. Os02g35660 | 43.1 | 34.9 | 45.4 | 36.6 | 39.5 | 37.0 | 32.3 | 37.4 | 34.0 | 39.7 |
| 40. Os07g08440 | 44.6 | 63.8 | 38.8 | 62.5 | 57.8 | 61.9 | 58.4 | 63.7 | 65.9 | 51.0 |
| 41. Os09g25040 | 54.3 | 37.7 | 60.7 | 39.3 | 41.5 | 39.3 | 33.9 | 38.3 | 35.7 | 37.7 |
| 42. Pt_scaff_II.416 | 47.3 | 84.3 | 42.0 | 65.6 | 78.3 | 62.2 | 73.3 | 89.4 | 61.0 | 55.2 |
| 43. Pt_scaff_70.65 | 44.9 | 60.7 | 40.3 | 71.9 | 64.5 | 74.6 | 56.5 | 63.4 | 66.2 | 50.8 |
| 44. Pt_scaff_XIII.403 | 45.4 | 59.0 | 42.2 | 69.2 | 65.9 | 73.1 | 55.4 | 64.4 | 64.7 | 49.7 |
| 45. Pt_scaff28.86 | 45.6 | 39.9 | 48.0 | 40.1 | 42.1 | 42.3 | 36.0 | 39.5 | 36.8 | 50.2 |
| 46. Pt_TC63334 | 47.6 | 84.3 | 42.6 | 65.0 | 77.2 | 62.5 | 73.7 | 89.1 | 62.0 | 53.6 |
| 47. TA14134 | 44.6 | 45.2 | 41.2 | 50.2 | 47.1 | 51.4 | 45.5 | 50.2 | 46.8 | 50.8 |
| 48. TA5414 | 55.8 | 41.2 | 98.9 | 41.2 | 42.1 | 42.7 | 37.0 | 42.9 | 39.1 | 39.7 |
| 49. TA3263 | 48.3 | 84.7 | 42.6 | 65.0 | 77.2 | 62.8 | 73.7 | 89.4 | 62.3 | 54.2 |
| 50. TA2825 | 47.3 | 86.0 | 41.6 | 66.6 | 79.5 | 63.7 | 74.6 | 90.4 | 60.9 | 55.9 |
| 51. TA1616 | 47.8 | 62.9 | 41.6 | 74.2 | 63.9 | 73.4 | 57.7 | 66.6 | 68.4 | 54.0 |
| 52. TA21665 | 44.4 | 67.6 | 42.9 | 64.4 | 59.5 | 61.0 | 60.1 | 66.0 | 62.5 | 52.3 |
| 53. TC172581 | 46.6 | 66.1 | 41.8 | 66.3 | 61.3 | 63.4 | 59.5 | 67.1 | 62.2 | 54.2 |
| 54. AK247217 | 45.1 | 78.1 | 42.0 | 67.8 | 72.5 | 64.4 | 70.5 | 82.8 | 60.6 | 52.6 |
| 55. TC104646 | 42.0 | 63.3 | 39.2 | 60.3 | 56.1 | 59.8 | 63.5 | 63.0 | 65.3 | 49.7 |
| 56. DV982110 | 44.9 | 61.6 | 41.6 | 53.4 | 49.1 | 51.7 | 56.9 | 58.1 | 62.0 | 56.2 |
| 57. WO051050seqID516 | 53.3 | 42.5 | 52.5 | 44.1 | 43.6 | 43.8 | 37.8 | 43.2 | 39.5 | 41.9 |
| 58. TC68930 | 47.3 | 47.4 | 42.0 | 50.5 | 46.2 | 52.0 | 48.3 | 50.2 | 45.0 | 50.5 |
| 59. TA30646 | 44.6 | 78.1 | 41.2 | 67.2 | 72.8 | 64.4 | 70.2 | 83.5 | 60.6 | 54.2 |
| 60. TA28621 | 46.8 | 67.1 | 41.6 | 65.6 | 61.8 | 64.4 | 59.5 | 68.1 | 63.5 | 54.2 |
| 61. TA34455 | 59.3 | 41.4 | 67.0 | 43.4 | 43.8 | 44.7 | 37.1 | 42.5 | 36.9 | 41.2 |
| 62. TA37666 | 60.7 | 47.1 | 63.1 | 48.4 | 48.4 | 49.0 | 42.1 | 49.0 | 45.3 | 44.5 |
| 63. TC253044 | 42.9 | 55.5 | 39.0 | 50.9 | 48.8 | 51.1 | 53.4 | 53.1 | 52.8 | 59.8 |
| 64. TabHLH11 | 42.7 | 66.2 | 38.8 | 59.7 | 55.8 | 60.1 | 61.9 | 62.7 | 66.9 | 50.3 |
| 65. TA46156 | 45.9 | 84.1 | 40.5 | 64.7 | 74.6 | 64.0 | 74.4 | 85.5 | 64.4 | 56.2 |
| 66. GSVIVT00017237001 | 59.1 | 40.4 | 69.5 | 44.0 | 45.5 | 45.7 | 40.9 | 45.9 | 39.7 | 43.8 |
| 67. TA46194 | 49.0 | 69.0 | 41.8 | 72.5 | 68.8 | 68.3 | 64.5 | 73.5 | 66.8 | 53.4 |
| 68. GSVIVT00016367001 | 44.5 | 35.5 | 46.2 | 37.7 | 40.8 | 38.6 | 32.8 | 37.1 | 34.6 | 45.4 |
| 69. TA139285 | 43.4 | 63.2 | 37.5 | 62.5 | 54.6 | 61.9 | 60.7 | 61.1 | 66.0 | 48.0 |
| 70. TA126400 | 44.9 | 65.3 | 41.4 | 61.6 | 56.1 | 61.0 | 62.5 | 63.0 | 63.2 | 50.0 |
| | 21 | 22 | 23 | 24 | 25 | 26 | 27 | 28 | 29 | 30 |
| 1. TC3698 | 51.4 | 53.4 | 51.7 | 31.6 | 48.5 | 38.8 | 52.7 | 25.4 | 54.5 | 53.0 |
| 2. AT1G03040 | 67.8 | 67.2 | 67.6 | 33.9 | 54.3 | 35.3 | 49.2 | 26.3 | 50.9 | 48.0 |
| 3. AT4G02590 | 72.3 | 73.6 | 73.3 | 32.8 | 57.1 | 37.7 | 50.3 | 27.5 | 52.6 | 49.5 |
| 4. AT2G24260 | 16.7 | 16.3 | 16.6 | 22.0 | 15.0 | 21.5 | 16.1 | 15.4 | 16.6 | 16.1 |
| 5. AT4G30980 | 36.1 | 35.9 | 36.2 | 40.8 | 34.8 | 44.8 | 36.2 | 26.7 | 36.5 | 36.1 |
| 6. AT5G58010 | 36.0 | 36.4 | 36.3 | 37.2 | 36.9 | 47.3 | 37.7 | 28.1 | 37.8 | 36.9 |
| 7. TC15501 | 60.7 | 59.0 | 58.0 | 36.2 | 47.9 | 37.1 | 54.0 | 30.8 | 53.8 | 53.8 |
| 8. TC19278 | 20.2 | 20.2 | 19.6 | 18.4 | 27.3 | 23.1 | 18.0 | 15.6 | 19.0 | 19.3 |
| 9. TC10015_part | 67.6 | 69.0 | 68.9 | 31.7 | 55.3 | 38.5 | 51.3 | 25.5 | 53.4 | 50.0 |
| 10. DY268946 | 44.7 | 43.8 | 44.2 | 32.7 | 43.2 | 38.9 | 44.6 | 24.4 | 45.8 | 45.4 |
| 11. TA2544 | 36.1 | 35.7 | 36.5 | 41.8 | 29.6 | 41.3 | 35.3 | 30.2 | 35.4 | 33.8 |
| 12. TA3392 | 76.7 | 76.1 | 75.2 | 33.9 | 56.2 | 36.2 | 52.2 | 25.6 | 54.3 | 51.6 |
| 13. TA12416 | 33.3 | 33.3 | 34.1 | 56.2 | 27.5 | 48.0 | 33.7 | 30.2 | 33.3 | 31.2 |
| 14. WO051050seqID77 | 54.3 | 54.0 | 52.5 | 33.3 | 47.2 | 36.7 | 54.2 | 27.7 | 54.3 | 56.0 |
| 15. WO051050seqID1671 | 70.7 | 70.3 | 68.9 | 32.0 | 53.2 | 34.4 | 47.6 | 27.4 | 49.4 | 48.5 |
| 16. TA55042 | 48.4 | 47.8 | 49.9 | 32.6 | 46.4 | 37.7 | 50.1 | 29.4 | 53.1 | 50.9 |
| 17. TC207545 | 64.4 | 65.1 | 65.6 | 30.9 | 77.6 | 37.8 | 52.6 | 23.9 | 55.6 | 52.0 |
| 18. TA13791 | 99.7 | 87.2 | 84.9 | 33.7 | 59.7 | 39.4 | 54.0 | 26.2 | 56.7 | 53.3 |
| 19. CO123623 | 50.5 | 49.5 | 49.2 | 30.9 | 52.2 | 39.3 | 51.1 | 25.4 | 53.2 | 50.3 |
| 20. DT543504 | 35.7 | 34.8 | 36.1 | 34.0 | 34.0 | 36.3 | 34.2 | 31.0 | 36.1 | 37.1 |
| 21. TC60118 | | 86.8 | 84.6 | 33.7 | 59.4 | 39.1 | 53.7 | 26.2 | 56.4 | 53.0 |
| 22. TC60119 | 90.8 | | 86.9 | 32.7 | 59.5 | 39.1 | 53.3 | 26.1 | 54.7 | 53.5 |
| 23. TC61833 | 90.5 | 92.5 | | 33.5 | 59.3 | 37.7 | 52.6 | 26.5 | 55.9 | 53.3 |
| 24. TC67603 | 42.6 | 42.2 | 42.2 | | 28.5 | 47.1 | 35.0 | 27.3 | 34.9 | 33.2 |
| 25. TC229602 | 65.0 | 64.5 | 63.9 | 35.8 | | 38.2 | 47.7 | 22.5 | 50.5 | 50.7 |
| 26. TC205173 | 50.7 | 51.9 | 51.6 | 56.4 | 45.7 | | 39.2 | 25.3 | 37.8 | 37.4 |
| 27. TA1140 | 65.7 | 66.0 | 65.4 | 45.2 | 54.2 | 52.2 | | 27.1 | 84.2 | 66.0 |
| 28. TC140470 | 37.6 | 37.4 | 37.8 | 42.8 | 29.7 | 36.4 | 38.0 | | 29.1 | 26.1 |
| 29. TA3490_part | 68.3 | 66.4 | 66.6 | 44.7 | 57.2 | 49.6 | 87.3 | 37.4 | | 68.0 |
| 30. CK293938 | 65.7 | 66.8 | 65.6 | 42.2 | 57.4 | 49.6 | 78.1 | 36.2 | 79.4 | |
| 31. TC8633 | 80.5 | 81.6 | 82.3 | 44.3 | 63.2 | 51.3 | 67.3 | 38.5 | 68.9 | 67.5 |
| 32. TC7102 | 44.0 | 44.0 | 45.1 | 62.1 | 34.8 | 55.5 | 44.7 | 43.0 | 42.7 | 44.0 |
| 33. TC7103 | 48.8 | 49.1 | 48.3 | 65.8 | 40.1 | 62.5 | 48.8 | 41.0 | 47.5 | 47.0 |
| 34. TC12771 | 65.7 | 65.8 | 64.6 | 43.1 | 55.7 | 50.7 | 78.1 | 37.4 | 78.5 | 98.0 |
| 35. Os03g58330 | 63.4 | 63.5 | 60.3 | 43.6 | 56.1 | 50.1 | 64.7 | 36.8 | 67.0 | 66.6 |
| 36. Os06g08500 | 43.3 | 45.2 | 47.4 | 46.4 | 37.1 | 51.2 | 47.7 | 36.2 | 44.4 | 42.5 |
| 37. Os06g09370 | 39.1 | 37.4 | 38.1 | 41.4 | 28.7 | 36.6 | 36.4 | 81.5 | 37.2 | 38.7 |
| 38. Os02g55250 | 41.3 | 41.3 | 42.2 | 56.0 | 35.1 | 50.1 | 42.0 | 45.3 | 44.0 | 41.5 |
| 39. Os02g35660 | 37.2 | 36.3 | 35.9 | 44.3 | 29.6 | 36.5 | 37.4 | 49.8 | 36.5 | 35.9 |
| 40. Os07g08440 | 63.4 | 62.8 | 63.9 | 41.0 | 55.3 | 49.6 | 63.4 | 35.6 | 64.5 | 67.6 |
| 41. Os09g25040 | 38.1 | 38.1 | 38.7 | 54.5 | 31.1 | 47.9 | 38.7 | 42.5 | 36.3 | 36.3 |
| 42. Pt_scaff_II.416 | 89.1 | 88.2 | 85.6 | 42.4 | 66.0 | 50.4 | 65.0 | 37.0 | 67.3 | 67.0 |
| 43. Pt_scaff_70.65 | 63.1 | 63.7 | 63.7 | 43.3 | 52.3 | 50.7 | 63.7 | 38.7 | 63.4 | 65.6 |
| 44. Pt_scaff_XIII.403 | 64.1 | 62.3 | 63.2 | 44.0 | 50.6 | 54.0 | 62.9 | 41.0 | 65.0 | 63.5 |
| 45. Pt_scaff28.86 | 39.3 | 39.9 | 39.5 | 47.8 | 31.8 | 42.1 | 39.9 | 47.6 | 38.6 | 40.6 |
| 46. Pt_TC63334 | 88.8 | 88.2 | 86.2 | 42.4 | 66.7 | 51.0 | 63.1 | 37.4 | 67.0 | 64.3 |
| 47. TA14134 | 50.2 | 48.9 | 46.5 | 43.6 | 42.8 | 54.9 | 50.2 | 35.1 | 49.2 | 48.9 |
| 48. TA5414 | 42.7 | 41.0 | 41.7 | 67.1 | 33.5 | 55.1 | 42.1 | 48.6 | 41.5 | 42.1 |
| 49. TA3263 | 89.1 | 88.5 | 86.6 | 43.1 | 66.7 | 51.0 | 63.1 | 37.4 | 67.3 | 64.7 |
| 50. TA2825 | 90.1 | 90.1 | 89.2 | 43.1 | 67.2 | 51.0 | 66.0 | 35.8 | 67.2 | 66.2 |
| 51. TA1616 | 66.3 | 65.0 | 65.0 | 42.9 | 55.2 | 51.0 | 65.6 | 38.3 | 63.2 | 65.6 |
| 52. TA21665 | 65.7 | 66.4 | 66.6 | 42.9 | 54.4 | 51.3 | 73.5 | 36.6 | 76.4 | 84.8 |
| 53. TC172581 | 66.8 | 67.4 | 65.6 | 42.2 | 55.6 | 50.7 | 76.1 | 38.5 | 76.0 | 92.1 |
| 54. AK247217 | 82.5 | 84.2 | 84.3 | 43.3 | 63.9 | 49.6 | 67.6 | 38.0 | 67.9 | 69.2 |
| 55. TC104646 | 62.7 | 61.5 | 61.6 | 43.1 | 59.2 | 49.3 | 62.1 | 35.1 | 66.6 | 67.6 |
| 56. DV982110 | 57.8 | 57.9 | 57.7 | 44.5 | 56.2 | 58.2 | 58.5 | 35.3 | 57.9 | 55.7 |
| 57. WO051050seqID516 | 43.0 | 43.6 | 43.6 | 50.5 | 35.0 | 46.0 | 41.9 | 45.9 | 41.3 | 41.9 |
| 58. TC68930 | 50.5 | 48.0 | 49.5 | 45.2 | 43.5 | 57.9 | 50.2 | 37.0 | 48.9 | 47.1 |
| 59. TA30646 | 83.2 | 84.2 | 84.3 | 42.9 | 63.9 | 49.6 | 68.3 | 37.6 | 67.5 | 68.5 |
| 60. TA28621 | 67.8 | 68.4 | 66.6 | 42.4 | 54.9 | 51.3 | 77.1 | 38.7 | 76.6 | 93.8 |
| 61. TA34455 | 42.3 | 43.4 | 41.8 | 63.1 | 34.2 | 53.0 | 44.5 | 45.3 | 42.3 | 44.3 |
| 62. TA37666 | 48.7 | 48.7 | 47.4 | 63.7 | 39.8 | 61.0 | 49.5 | 42.4 | 48.2 | 49.5 |
| 63. TC253044 | 52.8 | 54.9 | 50.8 | 40.3 | 47.6 | 48.4 | 50.3 | 56.5 | 55.9 | 54.7 |
| 64. TabHLH11 | 62.4 | 62.2 | 61.6 | 40.5 | 58.7 | 50.4 | 63.1 | 35.8 | 66.2 | 66.9 |
| 65. TA46156 | 85.1 | 85.2 | 83.3 | 44.7 | 67.8 | 53.4 | 67.3 | 38.0 | 70.0 | 70.9 |
| 66. GSVIVT00017237001 | 45.9 | 45.0 | 45.9 | 64.9 | 35.9 | 61.2 | 44.0 | 42.6 | 42.1 | 42.8 |
| 67. TA46194 | 73.2 | 72.5 | 72.2 | 44.3 | 57.8 | 54.3 | 70.6 | 38.7 | 72.8 | 74.8 |
| 68. GSVIVT00016367001 | 36.9 | 36.5 | 38.1 | 44.3 | 29.9 | 41.6 | 39.0 | 50.3 | 36.9 | 35.3 |
| 69. TA139285 | 60.7 | 61.5 | 61.0 | 40.7 | 56.1 | 49.0 | 64.7 | 35.6 | 66.2 | 68.9 |
| 70. TA126400 | 62.7 | 61.8 | 63.6 | 42.6 | 57.9 | 49.3 | 62.4 | 34.9 | 65.9 | 66.9 |
| | 31 | 32 | 33 | 34 | 35 | 36 | 37 | 38 | 39 | 40 |
| 1. TC3698 | 53.0 | 32.7 | 36.2 | 53.3 | 56.0 | 31.1 | 26.5 | 32.4 | 26.5 | 56.9 |
| 2. AT1G03040 | 65.5 | 33.7 | 35.4 | 48.3 | 51.4 | 30.9 | 25.8 | 34.1 | 27.9 | 49.8 |
| 3. AT4G02590 | 67.5 | 34.3 | 35.4 | 50.8 | 52.7 | 32.8 | 27.8 | 33.6 | 28.7 | 51.2 |
| 4. AT2G24260 | 16.8 | 23.1 | 21.8 | 16.3 | 16.7 | 17.5 | 15.5 | 21.2 | 16.4 | 16.4 |
| 5. AT4G30980 | 35.4 | 41.8 | 44.3 | 35.6 | 39.8 | 33.9 | 25.5 | 36.2 | 28.6 | 37.6 |
| 6. AT5G58010 | 37.9 | 36.0 | 39.7 | 36.4 | 37.4 | 37.7 | 26.9 | 36.4 | 26.1 | 37.4 |
| 7. TC15501 | 58.7 | 38.2 | 37.6 | 53.0 | 52.5 | 32.7 | 29.4 | 35.0 | 30.7 | 52.0 |
| 8. TC19278 | 20.5 | 17.9 | 20.2 | 18.6 | 19.5 | 20.8 | 15.6 | 19.1 | 17.9 | 19.8 |
| 9. TC10015_part | 64.1 | 32.8 | 35.7 | 50.6 | 51.8 | 32.9 | 26.0 | 32.9 | 26.7 | 52.8 |
| 10. DY268946 | 43.5 | 34.2 | 33.5 | 45.1 | 46.9 | 31.6 | 26.5 | 32.9 | 26.6 | 47.9 |
| 11. TA2544 | 35.1 | 45.9 | 42.6 | 35.0 | 35.1 | 39.3 | 31.1 | 42.5 | 32.1 | 35.3 |
| 12. TA3392 | 64.5 | 33.0 | 35.2 | 52.1 | 53.0 | 30.4 | 28.9 | 32.7 | 26.2 | 51.5 |
| 13. TA12416 | 32.6 | 56.3 | 55.6 | 31.8 | 32.2 | 36.9 | 28.7 | 45.2 | 30.6 | 31.4 |
| 14. WO051050seqID77 | 53.4 | 34.7 | 35.6 | 55.9 | 52.0 | 31.9 | 28.8 | 34.5 | 27.4 | 51.6 |
| 15. WO051050seqID1671 | 62.0 | 34.8 | 35.0 | 48.7 | 48.7 | 32.1 | 28.7 | 33.1 | 29.3 | 48.6 |
| 16. TA55042 | 49.4 | 35.2 | 36.8 | 50.3 | 51.3 | 33.9 | 32.2 | 36.3 | 27.3 | 51.0 |
| 17. TC207545 | 61.8 | 32.0 | 32.9 | 53.0 | 54.1 | 28.6 | 23.9 | 31.3 | 24.9 | 53.2 |
| 18. TA13791 | 69.0 | 35.6 | 38.5 | 53.3 | 54.6 | 33.2 | 27.1 | 33.8 | 28.2 | 51.7 |
| 19. CO123623 | 47.7 | 31.5 | 33.6 | 52.0 | 50.6 | 31.1 | 29.0 | 30.1 | 27.3 | 50.9 |
| 20. DT543504 | 35.7 | 31.9 | 33.4 | 38.1 | 34.5 | 31.8 | 28.8 | 32.3 | 30.8 | 32.5 |
| 21. TC60118 | 68.7 | 35.6 | 38.5 | 53.0 | 54.3 | 33.2 | 27.5 | 33.6 | 28.2 | 51.4 |
| 22. TC60119 | 70.1 | 36.7 | 37.3 | 54.4 | 53.1 | 33.1 | 27.0 | 34.2 | 28.2 | 51.1 |
| 23. TC61833 | 71.1 | 36.4 | 36.8 | 53.9 | 51.1 | 34.5 | 25.4 | 34.7 | 27.4 | 52.0 |
| 24. TC67603 | 33.2 | 49.6 | 52.5 | 33.7 | 34.3 | 35.6 | 28.3 | 40.6 | 30.7 | 32.6 |
| 25. TC229602 | 58.2 | 29.0 | 32.3 | 50.0 | 50.8 | 28.2 | 21.3 | 28.4 | 22.7 | 49.3 |
| 26. TC205173 | 39.8 | 47.3 | 53.1 | 38.0 | 38.7 | 40.3 | 26.6 | 41.2 | 27.9 | 38.6 |
| 27. TA1140 | 51.2 | 35.8 | 37.5 | 67.0 | 52.5 | 33.3 | 27.2 | 31.8 | 28.2 | 52.1 |
| 28. TC140470 | 27.9 | 28.7 | 27.7 | 27.0 | 26.6 | 24.4 | 71.1 | 28.1 | 35.1 | 26.1 |
| 29. TA3490_part | 53.2 | 34.4 | 36.5 | 68.5 | 54.0 | 32.7 | 28.3 | 33.3 | 27.6 | 53.7 |
| 30. CK293938 | 51.5 | 34.2 | 37.5 | 96.3 | 53.8 | 32.4 | 28.0 | 33.9 | 27.5 | 53.5 |
| 31. TC8633 | | 36.0 | 34.9 | 52.5 | 53.8 | 33.0 | 29.2 | 33.6 | 26.9 | 52.6 |
| 32. TC7102 | 44.7 | | 64.6 | 34.5 | 35.9 | 37.5 | 28.8 | 47.3 | 32.6 | 34.1 |
| 33. TC7103 | 46.5 | 72.9 | | 38.2 | 37.8 | 41.1 | 28.9 | 46.2 | 29.6 | 38.3 |
| 34. TC12771 | 67.5 | 44.5 | 48.1 | | 54.6 | 32.2 | 28.6 | 34.9 | 26.9 | 54.7 |
| 35. Os03g58330 | 66.9 | 42.7 | 46.0 | 66.1 | | 36.6 | 27.1 | 35.3 | 28.0 | 74.9 |
| 36. Os06g08500 | 42.5 | 49.2 | 55.6 | 45.0 | 47.4 | | 24.0 | 46.8 | 29.1 | 36.2 |
| 37. Os06g09370 | 38.3 | 43.9 | 41.2 | 38.5 | 35.8 | 37.4 | | 28.6 | 34.3 | 26.6 |
| 38. Os02g55250 | 44.0 | 60.5 | 59.0 | 43.5 | 42.2 | 59.2 | 46.4 | | 31.8 | 35.3 |
| 39. Os02g35660 | 35.9 | 44.1 | 40.3 | 36.5 | 36.1 | 36.6 | 47.9 | 45.6 | | 25.7 |
| 40. Os07g08440 | 66.6 | 41.8 | 45.7 | 68.1 | 82.0 | 46.0 | 35.8 | 41.7 | 34.0 | |
| 41. Os09g25040 | 37.5 | 58.5 | 54.9 | 37.1 | 37.3 | 47.3 | 43.7 | 56.3 | 44.8 | 37.5 |
| 42. Pt_scaff_II.416 | 82.1 | 44.5 | 48.3 | 66.7 | 63.3 | 44.7 | 39.5 | 43.3 | 36.6 | 64.3 |
| 43. Pt_scaff_70.65 | 63.1 | 44.5 | 47.0 | 65.9 | 60.7 | 44.7 | 42.9 | 44.2 | 37.8 | 60.7 |
| 44. Pt_scaff_XIII.403 | 63.5 | 44.9 | 47.5 | 63.2 | 59.9 | 43.6 | 41.8 | 44.9 | 38.2 | 59.0 |
| 45. Pt_scaff28.86 | 41.4 | 47.6 | 45.8 | 40.1 | 36.4 | 41.2 | 49.6 | 47.6 | 45.6 | 35.3 |
| 46. Pt_TC63334 | 82.8 | 45.1 | 48.8 | 64.7 | 64.0 | 44.1 | 38.3 | 43.5 | 35.3 | 65.0 |
| 47. TA14134 | 51.7 | 43.6 | 45.5 | 49.8 | 47.7 | 46.6 | 36.8 | 44.7 | 36.8 | 46.8 |
| 48. TA5414 | 41.2 | 69.4 | 63.9 | 40.8 | 38.5 | 47.2 | 44.8 | 57.1 | 45.4 | 39.3 |
| 49. TA3263 | 82.8 | 45.6 | 49.1 | 65.0 | 64.0 | 44.4 | 38.7 | 43.8 | 35.1 | 64.3 |
| 50. TA2825 | 83.4 | 46.0 | 49.4 | 66.2 | 63.2 | 45.0 | 37.9 | 43.3 | 36.6 | 65.2 |
| 51. TA1616 | 66.0 | 47.2 | 47.8 | 66.6 | 63.2 | 48.5 | 40.8 | 46.3 | 36.3 | 66.0 |
| 52. TA21665 | 64.2 | 43.8 | 48.6 | 84.9 | 65.9 | 44.7 | 35.6 | 43.3 | 37.2 | 65.9 |
| 53. TC172581 | 66.1 | 43.8 | 48.3 | 92.8 | 65.8 | 44.4 | 38.5 | 41.5 | 36.6 | 64.5 |
| 54. AK247217 | 95.0 | 42.7 | 47.3 | 67.5 | 64.6 | 43.6 | 37.9 | 44.2 | 35.9 | 64.6 |
| 55. TC104646 | 62.9 | 40.2 | 44.2 | 67.1 | 77.6 | 45.2 | 35.8 | 40.1 | 34.0 | 85.0 |
| 56. DV982110 | 55.6 | 43.6 | 50.4 | 54.4 | 57.5 | 46.0 | 35.6 | 43.5 | 34.9 | 59.0 |
| 57. WO051050seqID516 | 43.2 | 52.9 | 48.8 | 42.1 | 42.5 | 44.3 | 44.6 | 51.6 | 42.6 | 41.9 |
| 58. TC68930 | 47.4 | 45.1 | 50.4 | 47.1 | 49.8 | 47.7 | 37.0 | 45.8 | 35.9 | 46.8 |
| 59. TA30646 | 95.4 | 42.2 | 46.8 | 68.5 | 62.3 | 43.1 | 39.3 | 45.6 | 36.3 | 65.9 |
| 60. TA28621 | 66.8 | 43.6 | 48.6 | 94.4 | 66.8 | 45.0 | 38.5 | 41.5 | 36.5 | 64.1 |
| 61. TA34455 | 42.7 | 83.2 | 71.4 | 43.6 | 44.3 | 47.4 | 44.4 | 60.0 | 43.1 | 41.6 |
| 62. TA37666 | 49.5 | 71.1 | 88.9 | 50.3 | 48.2 | 54.7 | 41.8 | 55.8 | 38.5 | 47.6 |
| 63. TC253044 | 54.0 | 41.3 | 45.7 | 55.7 | 52.7 | 42.5 | 50.0 | 40.6 | 38.4 | 52.9 |
| 64. TabHLH11 | 65.6 | 41.8 | 45.2 | 67.8 | 86.4 | 43.3 | 36.8 | 41.0 | 36.3 | 80.5 |
| 65. TA46156 | 81.1 | 43.3 | 48.3 | 70.8 | 66.0 | 44.1 | 37.0 | 42.4 | 35.7 | 66.2 |
| 66. GSVIVT00017237001 | 46.2 | 68.2 | 65.1 | 43.8 | 43.3 | 52.4 | 43.1 | 58.5 | 42.4 | 44.7 |
| 67. TA46194 | 73.2 | 44.9 | 49.6 | 75.1 | 68.4 | 45.8 | 39.1 | 45.1 | 37.6 | 68.7 |
| 68. GSVIVT00016367001 | 38.8 | 45.4 | 44.3 | 35.5 | 36.5 | 39.6 | 50.5 | 46.2 | 49.4 | 35.9 |
| 69. TA139285 | 64.2 | 41.1 | 46.8 | 68.1 | 90.5 | 45.5 | 38.1 | 40.4 | 34.0 | 84.0 |
| 70. TA126400 | 62.3 | 40.0 | 45.2 | 66.1 | 76.2 | 44.1 | 35.6 | 40.8 | 35.3 | 82.9 |
| | 41 | 42 | 43 | 44 | 45 | 46 | 47 | 48 | 49 | 50 |
| 1. TC3698 | 30.0 | 50.8 | 48.7 | 47.8 | 28.7 | 50.8 | 31.8 | 29.7 | 51.4 | 54.0 |
| 2. AT1G03040 | 29.5 | 65.7 | 48.6 | 47.5 | 29.9 | 66.7 | 31.1 | 31.1 | 66.7 | 70.0 |
| 3. AT4G02590 | 31.7 | 71.8 | 52.1 | 49.3 | 30.9 | 72.8 | 31.6 | 33.6 | 73.1 | 75.2 |
| 4. AT2G24260 | 21.4 | 16.7 | 16.6 | 15.5 | 18.1 | 17.0 | 18.9 | 23.0 | 17.0 | 16.4 |
| 5. AT4G30980 | 33.8 | 35.5 | 36.1 | 33.6 | 29.6 | 36.4 | 34.9 | 41.6 | 36.8 | 37.5 |
| 6. AT5G58010 | 31.9 | 34.6 | 34.2 | 34.1 | 31.3 | 35.8 | 36.3 | 35.6 | 35.8 | 35.1 |
| 7. TC15501 | 33.5 | 59.7 | 55.6 | 55.5 | 30.7 | 62.0 | 30.8 | 35.2 | 61.5 | 61.2 |
| 8. TC19278 | 17.0 | 19.7 | 17.0 | 18.0 | 22.7 | 19.7 | 29.4 | 19.0 | 20.5 | 20.3 |
| 9. TC10015_part | 30.6 | 67.5 | 50.4 | 48.7 | 27.4 | 68.5 | 30.9 | 31.0 | 68.8 | 70.7 |
| 10. DY268946 | 31.5 | 42.9 | 54.2 | 51.6 | 29.6 | 44.0 | 36.8 | 33.1 | 44.0 | 43.7 |
| 11. TA2544 | 43.3 | 36.2 | 36.9 | 36.4 | 33.1 | 36.4 | 32.5 | 45.2 | 36.6 | 36.1 |
| 12. TA3392 | 30.8 | 76.3 | 49.3 | 48.6 | 28.3 | 78.0 | 30.2 | 31.0 | 78.0 | 76.7 |
| 13. TA12416 | 47.5 | 32.7 | 32.7 | 33.3 | 32.5 | 33.5 | 31.2 | 98.3 | 32.8 | 33.5 |
| 14. WO051050seqID77 | 32.3 | 54.0 | 63.0 | 61.3 | 29.3 | 54.6 | 32.1 | 32.0 | 54.6 | 54.3 |
| 15. WO051050seqID1671 | 33.4 | 70.4 | 50.5 | 50.7 | 30.9 | 70.3 | 28.9 | 32.9 | 70.6 | 73.4 |
| 16. TA55042 | 31.1 | 47.8 | 61.3 | 60.1 | 30.4 | 48.1 | 30.9 | 33.3 | 48.1 | 50.0 |
| 17. TC207545 | 28.8 | 67.3 | 48.3 | 44.8 | 27.2 | 68.3 | 32.8 | 30.2 | 68.7 | 69.8 |
| 18. TA13791 | 32.5 | 80.7 | 50.1 | 50.7 | 30.7 | 82.0 | 32.6 | 33.3 | 82.7 | 82.1 |
| 19. CO123623 | 29.6 | 50.3 | 58.4 | 56.5 | 26.2 | 51.5 | 32.1 | 33.1 | 51.5 | 48.1 |
| 20. DT543504 | 29.0 | 33.3 | 33.3 | 32.7 | 40.8 | 32.9 | 36.1 | 30.8 | 33.5 | 35.1 |
| 21. TC60118 | 32.3 | 80.4 | 49.9 | 50.4 | 30.7 | 81.7 | 32.6 | 33.3 | 82.4 | 81.8 |
| 22. TC60119 | 31.4 | 80.5 | 49.9 | 48.6 | 30.1 | 81.8 | 31.2 | 33.6 | 82.4 | 82.8 |
| 23. TC61833 | 31.2 | 78.9 | 49.1 | 48.4 | 30.1 | 80.5 | 30.2 | 34.7 | 81.2 | 81.6 |
| 24. TC67603 | 43.3 | 33.3 | 33.2 | 32.0 | 33.3 | 34.0 | 31.5 | 56.8 | 33.9 | 32.8 |
| 25. TC229602 | 26.2 | 61.0 | 43.8 | 41.6 | 25.1 | 62.3 | 32.9 | 27.7 | 62.7 | 64.2 |
| 26. TC205173 | 41.4 | 38.3 | 36.5 | 36.4 | 30.9 | 38.3 | 36.8 | 47.9 | 38.3 | 39.6 |
| 27. TA1140 | 31.2 | 54.7 | 54.0 | 50.8 | 27.7 | 52.7 | 31.9 | 34.3 | 52.7 | 52.9 |
| 28. TC140470 | 28.2 | 26.2 | 28.1 | 28.7 | 31.9 | 25.2 | 24.0 | 31.2 | 25.3 | 24.9 |
| 29. TA3490_part | 30.3 | 54.9 | 53.0 | 52.6 | 29.0 | 54.3 | 31.7 | 33.3 | 54.9 | 55.0 |
| 30. CK293938 | 30.0 | 53.0 | 52.7 | 50.9 | 28.6 | 52.0 | 30.9 | 31.2 | 52.6 | 54.0 |
| 31. TC8633 | 31.4 | 69.9 | 52.7 | 50.7 | 30.5 | 71.2 | 34.0 | 32.1 | 71.5 | 72.4 |
| 32. TC7102 | 48.4 | 35.3 | 33.5 | 34.4 | 32.9 | 35.7 | 32.8 | 56.1 | 35.7 | 36.7 |
| 33. TC7103 | 44.7 | 34.3 | 34.8 | 36.7 | 32.9 | 35.7 | 34.1 | 55.3 | 36.2 | 37.2 |
| 34. TC12771 | 30.0 | 53.6 | 53.0 | 50.6 | 28.8 | 51.7 | 31.4 | 31.9 | 52.3 | 54.0 |
| 35. Os03g58330 | 32.3 | 54.3 | 50.1 | 49.0 | 27.4 | 51.2 | 33.5 | 31.8 | 51.2 | 55.0 |
| 36. Os06g08500 | 38.0 | 32.9 | 32.1 | 31.3 | 27.7 | 34.3 | 32.3 | 37.9 | 34.6 | 33.9 |
| 37. Os06g09370 | 28.6 | 27.6 | 31.2 | 30.4 | 32.1 | 27.9 | 23.9 | 27.8 | 28.1 | 26.7 |
| 38. Os02g55250 | 46.4 | 33.4 | 34.2 | 34.4 | 32.8 | 33.7 | 33.5 | 45.8 | 34.7 | 34.1 |
| 39. Os02g35660 | 30.4 | 26.4 | 29.1 | 27.2 | 31.9 | 26.1 | 25.7 | 30.5 | 26.4 | 28.2 |
| 40. Os07g08440 | 31.4 | 53.4 | 50.0 | 47.8 | 27.7 | 52.3 | 31.7 | 31.7 | 52.3 | 56.2 |
| 41. Os09g25040 | | 30.6 | 31.2 | 31.2 | 31.1 | 30.9 | 29.1 | 47.7 | 31.7 | 31.5 |
| 42. Pt_scaff_II.416 | 38.3 | | 50.3 | 49.6 | 29.1 | 93.7 | 30.5 | 33.0 | 93.0 | 88.9 |
| 43. Pt_scaff_70.65 | 38.1 | 63.1 | | 88.4 | 29.5 | 50.0 | 31.0 | 32.4 | 49.7 | 51.6 |
| 44. Pt_scaff_XIII.403 | 38.5 | 63.2 | 90.7 | | 27.9 | 49.6 | 28.2 | 32.3 | 49.3 | 49.6 |
| 45. Pt_scaff28.86 | 46.1 | 39.3 | 40.4 | 40.6 | | 29.8 | 31.8 | 33.2 | 30.3 | 28.9 |
| 46. Pt_TC63334 | 38.1 | 95.3 | 63.4 | 61.4 | 40.4 | | 30.8 | 33.6 | 98.7 | 89.2 |
| 47. TA14134 | 38.1 | 48.3 | 49.2 | 47.6 | 42.1 | 49.2 | | 30.1 | 30.8 | 31.4 |
| 48. TA5414 | 60.5 | 42.1 | 41.0 | 42.1 | 47.9 | 42.7 | 39.7 | | 32.7 | 33.8 |
| 49. TA3263 | 38.7 | 95.0 | 63.4 | 61.4 | 41.0 | 99.0 | 49.8 | 42.1 | | 89.2 |
| 50. TA2825 | 39.1 | 93.3 | 64.7 | 62.9 | 39.0 | 93.0 | 50.2 | 41.2 | 93.3 | |
| 51. TA1616 | 39.5 | 65.6 | 83.7 | 80.5 | 41.2 | 64.1 | 50.3 | 40.6 | 64.1 | 66.3 |
| 52. TA21665 | 37.7 | 67.0 | 63.7 | 63.2 | 37.7 | 66.7 | 48.0 | 41.2 | 67.0 | 66.6 |
| 53. TC172581 | 38.1 | 68.4 | 64.7 | 63.5 | 39.9 | 66.8 | 49.8 | 42.1 | 67.1 | 68.4 |
| 54. AK247217 | 37.9 | 83.8 | 65.3 | 63.8 | 42.8 | 84.4 | 50.8 | 41.9 | 84.4 | 86.1 |
| 55. TC104646 | 37.1 | 63.3 | 57.4 | 57.8 | 36.0 | 63.7 | 44.6 | 38.9 | 64.0 | 62.9 |
| 56. DV982110 | 38.9 | 58.3 | 54.1 | 50.3 | 40.1 | 58.3 | 51.1 | 41.7 | 58.7 | 57.5 |
| 57. WO051050seqID516 | 52.3 | 44.7 | 44.5 | 44.7 | 49.5 | 42.5 | 42.8 | 51.7 | 43.0 | 43.0 |
| 58. TC68930 | 40.9 | 49.8 | 48.0 | 46.1 | 45.0 | 50.8 | 63.7 | 40.4 | 51.1 | 48.9 |
| 59. TA30646 | 37.9 | 84.1 | 65.3 | 63.8 | 42.8 | 84.8 | 49.8 | 41.7 | 84.8 | 85.8 |
| 60. TA28621 | 37.7 | 68.8 | 65.3 | 63.8 | 40.4 | 67.4 | 48.3 | 41.2 | 67.8 | 69.1 |
| 61. TA34455 | 59.5 | 42.5 | 44.7 | 46.5 | 46.1 | 41.2 | 42.7 | 66.9 | 40.9 | 42.5 |
| 62. TA37666 | 52.3 | 49.7 | 51.0 | 49.2 | 43.9 | 50.0 | 47.1 | 63.5 | 50.3 | 47.6 |
| 63. TC253044 | 36.5 | 54.0 | 49.8 | 50.3 | 41.4 | 53.3 | 46.8 | 39.1 | 54.0 | 54.5 |
| 64. TabHLH11 | 36.5 | 62.3 | 58.3 | 59.0 | 36.4 | 63.0 | 45.5 | 38.2 | 63.3 | 63.2 |
| 65. TA46156 | 37.5 | 85.0 | 64.7 | 61.4 | 39.0 | 85.3 | 50.5 | 40.2 | 85.7 | 87.0 |
| 66. GSVIVT00017237001 | 56.5 | 44.3 | 45.9 | 48.1 | 47.6 | 45.0 | 44.0 | 69.2 | 45.2 | 44.7 |
| 67. TA46194 | 39.7 | 73.8 | 70.4 | 69.2 | 40.1 | 73.5 | 49.5 | 42.1 | 73.8 | 73.5 |
| 68. GSVIVT00016367001 | 45.9 | 38.8 | 40.6 | 41.2 | 63.9 | 36.7 | 39.0 | 45.6 | 36.3 | 37.9 |
| 69. TA139285 | 37.7 | 61.7 | 58.3 | 58.4 | 38.4 | 61.7 | 47.1 | 38.2 | 61.7 | 61.2 |
| 70. TA126400 | 36.7 | 64.0 | 58.0 | 55.7 | 36.4 | 64.7 | 45.8 | 41.5 | 65.0 | 64.9 |
| | 51 | 52 | 53 | 54 | 55 | 56 | 57 | 58 | 59 | 60 |
| 1. TC3698 | 50.6 | 52.3 | 50.2 | 54.4 | 58.0 | 45.1 | 33.3 | 33.4 | 54.7 | 50.8 |
| 2. AT1G03040 | 52.4 | 46.8 | 49.2 | 66.5 | 50.6 | 40.2 | 33.0 | 31.8 | 67.0 | 49.2 |
| 3. AT4G02590 | 54.0 | 49.4 | 53.2 | 70.2 | 53.4 | 43.1 | 33.3 | 32.5 | 69.9 | 52.7 |
| 4. AT2G24260 | 17.3 | 15.6 | 15.4 | 17.0 | 16.6 | 18.5 | 20.8 | 19.9 | 16.5 | 15.7 |
| 5. AT4G30980 | 36.4 | 36.1 | 36.9 | 36.4 | 41.0 | 42.2 | 34.9 | 36.4 | 36.6 | 35.7 |
| 6. AT5G58010 | 33.9 | 36.2 | 35.1 | 35.4 | 38.3 | 46.5 | 33.5 | 39.9 | 36.2 | 34.7 |
| 7. TC15501 | 59.3 | 51.0 | 51.4 | 61.1 | 51.6 | 41.5 | 36.4 | 30.0 | 60.3 | 51.7 |
| 8. TC19278 | 18.3 | 18.8 | 18.4 | 19.8 | 21.0 | 25.1 | 20.2 | 30.4 | 20.1 | 18.4 |
| 9. TC10015_part | 53.3 | 48.7 | 50.0 | 65.9 | 51.8 | 42.4 | 32.8 | 31.8 | 66.2 | 50.0 |
| 10. DY268946 | 57.3 | 42.4 | 43.9 | 41.7 | 47.0 | 40.7 | 35.5 | 35.9 | 44.5 | 44.9 |
| 11. TA2544 | 37.0 | 33.5 | 35.9 | 35.7 | 35.1 | 37.6 | 40.8 | 34.2 | 34.5 | 36.1 |
| 12. TA3392 | 52.6 | 53.2 | 52.5 | 68.3 | 51.8 | 42.8 | 33.4 | 31.3 | 68.0 | 53.2 |
| 13. TA12416 | 33.5 | 30.3 | 32.2 | 32.6 | 32.9 | 35.2 | 37.7 | 31.7 | 32.2 | 32.2 |
| 14. WO051050seqID77 | 63.7 | 54.0 | 54.0 | 55.3 | 52.0 | 41.4 | 34.8 | 31.2 | 55.0 | 53.5 |
| 15. WO051050seqID1671 | 51.6 | 46.5 | 48.3 | 65.7 | 48.6 | 38.5 | 33.5 | 29.4 | 66.0 | 48.6 |
| 16. TA55042 | 62.5 | 47.4 | 50.3 | 49.2 | 51.5 | 40.4 | 31.6 | 33.0 | 49.5 | 50.9 |
| 17. TC207545 | 48.5 | 50.7 | 51.6 | 64.1 | 56.7 | 49.3 | 31.8 | 35.2 | 64.4 | 51.3 |
| 18. TA13791 | 54.9 | 53.4 | 54.2 | 71.8 | 54.9 | 43.3 | 35.4 | 32.8 | 72.4 | 54.2 |
| 19. CO123623 | 61.3 | 47.6 | 48.1 | 45.8 | 53.4 | 47.8 | 32.2 | 33.1 | 46.1 | 49.7 |
| 20. DT543504 | 33.1 | 35.0 | 36.4 | 34.1 | 34.6 | 41.2 | 31.0 | 37.2 | 35.3 | 37.2 |
| 21. TC60118 | 54.7 | 53.1 | 53.9 | 71.5 | 54.6 | 43.0 | 35.2 | 32.3 | 72.1 | 53.9 |
| 22. TC60119 | 53.3 | 53.8 | 54.1 | 73.5 | 51.7 | 42.9 | 35.1 | 32.4 | 73.8 | 55.0 |
| 23. TC61833 | 53.3 | 53.1 | 55.0 | 74.3 | 52.3 | 43.2 | 35.2 | 33.3 | 74.3 | 54.9 |
| 24. TC67603 | 34.2 | 32.5 | 33.0 | 32.7 | 33.9 | 37.6 | 36.3 | 33.2 | 32.5 | 33.6 |
| 25. TC229602 | 47.9 | 47.0 | 49.0 | 59.8 | 52.5 | 48.2 | 29.4 | 34.5 | 60.1 | 49.0 |
| 26. TC205173 | 36.5 | 37.0 | 38.1 | 38.2 | 38.2 | 48.5 | 36.9 | 40.7 | 38.0 | 37.3 |
| 27. TA1140 | 53.7 | 61.7 | 64.3 | 55.4 | 52.8 | 41.1 | 31.4 | 32.8 | 54.0 | 64.9 |
| 28. TC140470 | 27.4 | 27.6 | 27.4 | 29.0 | 26.1 | 27.3 | 27.7 | 25.0 | 28.6 | 27.4 |
| 29. TA3490_part | 53.7 | 66.0 | 67.0 | 55.5 | 56.8 | 45.3 | 32.3 | 33.6 | 55.5 | 67.3 |
| 30. CK293938 | 54.1 | 76.4 | 87.9 | 53.3 | 56.8 | 41.2 | 32.7 | 32.7 | 53.5 | 88.9 |
| 31. TC8633 | 52.6 | 51.5 | 51.9 | 90.8 | 52.7 | 43.9 | 35.0 | 31.9 | 91.1 | 51.9 |
| 32. TC7102 | 36.8 | 33.2 | 35.6 | 35.7 | 34.3 | 36.2 | 38.0 | 33.4 | 35.2 | 35.3 |
| 33. TC7103 | 37.7 | 36.6 | 37.8 | 36.2 | 37.0 | 41.0 | 37.6 | 37.0 | 36.0 | 38.5 |
| 34. TC12771 | 54.7 | 77.7 | 89.2 | 54.1 | 57.4 | 40.9 | 32.1 | 33.1 | 53.8 | 90.5 |
| 35. Os03g58330 | 52.8 | 51.1 | 52.1 | 53.6 | 72.9 | 44.2 | 34.1 | 34.6 | 54.0 | 52.7 |
| 36. Os06g08500 | 34.5 | 29.6 | 33.1 | 33.1 | 33.3 | 36.6 | 32.8 | 32.0 | 32.8 | 32.7 |
| 37. Os06g09370 | 30.1 | 26.3 | 28.6 | 28.5 | 27.4 | 28.2 | 27.5 | 25.4 | 28.4 | 27.6 |
| 38. Os02g55250 | 35.8 | 33.3 | 34.2 | 33.5 | 34.0 | 36.1 | 36.8 | 34.3 | 34.6 | 34.0 |
| 39. Os02g35660 | 27.7 | 25.5 | 27.8 | 27.3 | 26.5 | 27.9 | 29.1 | 26.6 | 27.6 | 28.1 |
| 40. Os07g08440 | 55.8 | 51.9 | 50.8 | 51.4 | 81.3 | 45.6 | 33.6 | 31.9 | 52.6 | 50.8 |
| 41. Os09g25040 | 31.6 | 29.4 | 30.5 | 31.7 | 31.1 | 32.5 | 37.2 | 31.3 | 31.5 | 30.4 |
| 42. Pt_scaff_II.416 | 52.1 | 52.5 | 54.9 | 72.7 | 53.4 | 44.4 | 36.5 | 32.4 | 73.0 | 54.5 |
| 43. Pt_scaff_70.65 | 73.2 | 51.5 | 51.7 | 52.3 | 49.4 | 42.3 | 34.6 | 31.6 | 52.0 | 52.0 |
| 44. Pt_scaff_XIII.403 | 71.3 | 49.9 | 50.4 | 50.6 | 48.8 | 40.0 | 34.8 | 30.5 | 50.6 | 51.3 |
| 45. Pt_scaff28.86 | 29.8 | 28.7 | 27.9 | 30.1 | 27.6 | 31.1 | 33.6 | 32.2 | 30.1 | 28.5 |
| 46. Pt_TC63334 | 52.3 | 52.5 | 53.9 | 74.0 | 53.7 | 44.6 | 35.2 | 33.1 | 74.3 | 53.9 |
| 47. TA14134 | 31.4 | 29.6 | 30.5 | 33.2 | 31.4 | 39.1 | 33.7 | 49.4 | 33.4 | 30.0 |
| 48. TA5414 | 32.4 | 30.3 | 32.5 | 32.4 | 31.9 | 35.3 | 38.1 | 30.2 | 31.8 | 32.5 |
| 49. TA3263 | 52.6 | 53.1 | 54.5 | 74.3 | 54.3 | 44.9 | 35.8 | 33.6 | 74.6 | 54.5 |
| 50. TA2825 | 53.6 | 53.6 | 54.9 | 76.3 | 54.0 | 44.8 | 35.0 | 32.0 | 76.3 | 54.9 |
| 51. TA1616 | | 51.1 | 52.4 | 54.1 | 54.8 | 42.5 | 35.7 | 32.1 | 54.1 | 53.6 |
| 52. TA21665 | 65.0 | | 75.2 | 52.3 | 53.8 | 43.0 | 32.0 | 32.5 | 52.0 | 76.5 |
| 53. TC172581 | 65.6 | 82.2 | | 53.3 | 54.0 | 43.5 | 34.0 | 31.8 | 52.1 | 96.7 |
| 54. AK247217 | 66.9 | 65.6 | 66.8 | | 52.8 | 44.3 | 35.0 | 32.8 | 98.3 | 53.8 |
| 55. TC104646 | 61.7 | 65.9 | 65.8 | 62.9 | | 48.5 | 34.2 | 34.4 | 53.5 | 55.0 |
| 56. DV982110 | 53.7 | 57.4 | 53.3 | 55.0 | 60.3 | | 54.2 | 40.7 | 45.0 | 43.2 |
| 57. WO051050seqID516 | 46.0 | 41.7 | 43.0 | 42.3 | 42.3 | 55.7 | | 37.2 | 34.6 | 33.7 |
| 58. TC68930 | 50.2 | 48.3 | 50.2 | 49.5 | 47.7 | 53.2 | 47.9 | | 32.9 | 31.7 |
| 59. TA30646 | 66.9 | 65.2 | 66.8 | 99.0 | 63.6 | 56.6 | 42.1 | 49.2 | | 53.0 |
| 60. TA28621 | 66.0 | 83.6 | 97.7 | 67.1 | 65.5 | 53.6 | 43.8 | 48.3 | 67.4 | |
| 61. TA34455 | 43.0 | 40.9 | 43.2 | 41.4 | 40.0 | 42.5 | 53.8 | 44.5 | 41.2 | 42.7 |
| 62. TA37666 | 48.2 | 49.7 | 48.4 | 47.6 | 44.5 | 46.1 | 48.8 | 51.0 | 48.2 | 49.5 |
| 63. TC253044 | 49.1 | 54.4 | 53.6 | 51.7 | 50.0 | 55.2 | 40.0 | 51.7 | 51.0 | 53.9 |
| 64. TabHLH11 | 59.5 | 65.9 | 66.1 | 65.6 | 83.3 | 60.5 | 43.0 | 46.2 | 65.2 | 64.5 |
| 65. TA46156 | 65.0 | 66.9 | 67.8 | 82.5 | 65.1 | 60.2 | 42.5 | 48.9 | 82.5 | 69.4 |
| 66. GSVIVT00017237001 | 45.0 | 43.1 | 44.7 | 44.7 | 41.4 | 45.7 | 55.9 | 47.4 | 44.5 | 45.2 |
| 67. TA46194 | 74.8 | 72.5 | 73.2 | 74.4 | 66.8 | 56.9 | 44.3 | 50.5 | 74.4 | 73.5 |
| 68. GSVIVT00016367001 | 37.9 | 36.7 | 37.3 | 38.8 | 34.6 | 37.3 | 44.5 | 40.6 | 38.6 | 37.1 |
| 69. TA139285 | 64.1 | 66.2 | 65.5 | 64.2 | 82.5 | 59.6 | 42.8 | 48.6 | 64.6 | 65.8 |
| 70. TA126400 | 62.0 | 66.2 | 64.5 | 61.9 | 92.3 | 59.3 | 42.5 | 48.0 | 61.9 | 65.5 |
| | 61 | 62 | 63 | 64 | 65 | 66 | 67 | 68 | 69 | 70 |
| 1. TC3698 | 31.4 | 35.3 | 37.5 | 56.1 | 53.5 | 34.9 | 54.6 | 25.8 | 58.1 | 55.7 |
| 2. AT1G03040 | 32.8 | 36.4 | 37.3 | 50.6 | 63.2 | 33.5 | 53.4 | 28.0 | 50.8 | 49.4 |
| 3. AT4G02590 | 33.4 | 38.9 | 37.0 | 53.7 | 69.0 | 34.8 | 56.3 | 28.5 | 53.7 | 50.7 |
| 4. AT2G24260 | 20.6 | 21.8 | 14.8 | 17.0 | 16.3 | 22.1 | 16.5 | 16.3 | 16.8 | 16.5 |
| 5. AT4G30980 | 41.3 | 43.2 | 35.3 | 39.5 | 38.6 | 39.7 | 37.3 | 29.5 | 40.2 | 40.5 |
| 6. AT5G58010 | 36.6 | 40.5 | 36.6 | 37.3 | 36.1 | 36.2 | 35.9 | 28.6 | 38.4 | 37.5 |
| 7. TC15501 | 37.0 | 37.5 | 34.0 | 51.1 | 59.6 | 34.8 | 64.3 | 30.7 | 53.4 | 49.7 |
| 8. TC19278 | 17.0 | 20.6 | 24.1 | 19.9 | 21.3 | 20.0 | 20.1 | 19.5 | 20.2 | 20.1 |
| 9. TC10015_part | 32.7 | 35.1 | 36.8 | 53.9 | 68.5 | 33.2 | 54.4 | 26.9 | 51.8 | 51.6 |
| 10. DY268946 | 34.0 | 34.6 | 33.1 | 49.0 | 45.3 | 36.4 | 50.0 | 30.2 | 46.1 | 45.5 |
| 11. TA2544 | 46.6 | 45.3 | 31.7 | 32.9 | 36.3 | 42.9 | 37.1 | 33.9 | 36.2 | 35.0 |
| 12. TA3392 | 34.1 | 36.5 | 37.5 | 53.7 | 73.3 | 34.2 | 57.6 | 28.0 | 54.4 | 52.6 |
| 13. TA12416 | 53.7 | 52.9 | 28.8 | 32.9 | 33.3 | 58.2 | 33.3 | 31.9 | 31.8 | 33.3 |
| 14. WO051050seqID77 | 35.8 | 33.9 | 36.7 | 49.2 | 56.2 | 33.4 | 60.3 | 26.9 | 52.6 | 51.2 |
| 15. WO051050seqID1671 | 33.8 | 34.8 | 33.8 | 48.9 | 66.8 | 34.0 | 57.0 | 29.8 | 49.6 | 48.9 |
| 16. TA55042 | 35.3 | 36.8 | 35.1 | 49.0 | 51.4 | 34.2 | 56.0 | 28.4 | 52.0 | 51.2 |
| 17. TC207545 | 29.6 | 32.8 | 39.7 | 54.5 | 67.5 | 33.2 | 55.4 | 26.1 | 54.6 | 55.6 |
| 18. TA13791 | 36.0 | 38.0 | 36.3 | 54.7 | 75.6 | 36.5 | 59.8 | 29.1 | 54.6 | 53.7 |
| 19. CO123623 | 29.8 | 33.3 | 36.7 | 53.0 | 49.4 | 30.9 | 55.6 | 27.3 | 52.5 | 51.9 |
| 20. DT543504 | 32.0 | 33.9 | 41.4 | 37.9 | 36.0 | 31.4 | 34.5 | 37.8 | 34.8 | 35.2 |
| 21. TC60118 | 36.0 | 38.0 | 36.3 | 54.4 | 75.2 | 36.5 | 59.5 | 29.1 | 54.2 | 53.4 |
| 22. TC60119 | 34.8 | 37.5 | 36.4 | 53.9 | 75.7 | 35.6 | 59.4 | 29.0 | 53.9 | 51.2 |
| 23. TC61833 | 34.0 | 36.7 | 34.1 | 53.1 | 73.4 | 35.2 | 59.2 | 28.6 | 53.8 | 52.5 |
| 24. TC67603 | 46.9 | 51.7 | 30.2 | 32.6 | 34.9 | 51.4 | 34.0 | 31.0 | 32.4 | 33.9 |
| 25. TC229602 | 27.7 | 31.3 | 34.7 | 51.4 | 63.3 | 29.4 | 53.2 | 23.3 | 51.4 | 50.0 |
| 26. TC205173 | 42.1 | 48.7 | 35.1 | 38.1 | 39.7 | 52.3 | 40.4 | 30.7 | 37.6 | 38.8 |
| 27. TA1140 | 34.5 | 37.4 | 36.7 | 52.1 | 54.3 | 35.5 | 61.0 | 27.7 | 54.6 | 52.8 |
| 28. TC140470 | 30.3 | 28.1 | 55.1 | 25.1 | 24.9 | 29.7 | 28.1 | 34.4 | 25.2 | 25.5 |
| 29. TA3490_part | 33.6 | 36.7 | 36.5 | 54.6 | 58.5 | 34.0 | 61.3 | 26.3 | 55.1 | 54.5 |
| 30. CK293938 | 34.3 | 37.7 | 36.6 | 52.6 | 55.9 | 34.3 | 65.0 | 27.8 | 55.8 | 54.2 |
| 31. TC8633 | 33.7 | 36.8 | 35.2 | 53.7 | 71.7 | 36.0 | 59.3 | 29.4 | 54.1 | 50.9 |
| 32. TC7102 | 71.8 | 63.0 | 31.4 | 36.8 | 34.2 | 54.6 | 35.6 | 30.0 | 34.8 | 34.0 |
| 33. TC7103 | 62.4 | 83.3 | 33.6 | 39.1 | 36.0 | 53.1 | 38.0 | 29.6 | 38.5 | 36.9 |
| 34. TC12771 | 34.6 | 38.1 | 36.6 | 53.7 | 57.2 | 33.9 | 66.2 | 28.7 | 55.8 | 54.2 |
| 35. Os03g58330 | 36.6 | 37.6 | 34.9 | 80.3 | 53.5 | 34.5 | 58.3 | 27.8 | 87.2 | 69.4 |
| 36. Os06g08500 | 39.0 | 40.0 | 30.1 | 34.1 | 32.6 | 40.3 | 33.5 | 27.5 | 35.9 | 32.3 |
| 37. Os06g09370 | 30.3 | 28.4 | 45.0 | 26.8 | 27.4 | 29.2 | 27.7 | 34.1 | 28.0 | 25.9 |
| 38. Os02g55250 | 46.1 | 44.2 | 31.3 | 33.8 | 33.6 | 46.3 | 34.4 | 30.3 | 34.6 | 34.8 |
| 39. Os02g35660 | 31.3 | 29.8 | 29.5 | 27.1 | 25.9 | 31.3 | 27.7 | 33.7 | 27.2 | 27.6 |
| 40. Os07g08440 | 33.6 | 36.3 | 35.3 | 74.9 | 53.0 | 35.8 | 57.1 | 27.0 | 79.7 | 76.2 |
| 41. Os09g25040 | 45.6 | 43.6 | 27.9 | 31.1 | 30.5 | 47.3 | 31.6 | 30.4 | 32.3 | 31.4 |
| 42. Pt_scaff_II.416 | 34.1 | 35.6 | 35.5 | 53.9 | 74.1 | 34.4 | 61.5 | 28.9 | 55.3 | 52.2 |
| 43. Pt_scaff_70.65 | 34.1 | 37.6 | 35.0 | 48.8 | 53.6 | 35.0 | 58.9 | 28.0 | 49.5 | 50.1 |
| 44. Pt_scaff_XIII.403 | 34.7 | 36.5 | 34.2 | 47.5 | 50.3 | 35.8 | 57.4 | 29.5 | 47.6 | 48.1 |
| 45. Pt_scaff28.86 | 32.2 | 32.3 | 31.2 | 28.1 | 28.3 | 34.3 | 31.0 | 49.3 | 29.8 | 26.4 |
| 46. Pt_TC63334 | 33.9 | 37.2 | 34.8 | 54.8 | 76.6 | 35.1 | 60.0 | 28.5 | 55.6 | 53.1 |
| 47. TA14134 | 30.4 | 35.1 | 32.5 | 32.0 | 32.4 | 33.7 | 32.5 | 29.4 | 32.9 | 32.2 |
| 48. TA5414 | 52.7 | 53.3 | 29.2 | 32.9 | 33.8 | 57.9 | 33.8 | 32.1 | 32.6 | 32.8 |
| 49. TA3263 | 33.8 | 37.7 | 34.8 | 55.1 | 76.9 | 35.6 | 60.0 | 28.3 | 55.6 | 53.4 |
| 50. TA2825 | 34.6 | 35.8 | 35.6 | 55.8 | 77.7 | 35.8 | 62.0 | 28.0 | 55.5 | 53.7 |
| 51. TA1616 | 35.0 | 36.8 | 34.7 | 51.4 | 56.6 | 34.4 | 62.5 | 29.2 | 55.0 | 54.4 |
| 52. TA21665 | 32.3 | 36.3 | 35.6 | 52.1 | 52.9 | 33.2 | 60.5 | 27.6 | 53.6 | 52.7 |
| 53. TC172581 | 34.2 | 37.7 | 37.1 | 51.9 | 57.3 | 35.3 | 64.2 | 28.6 | 53.1 | 51.6 |
| 54. AK247217 | 34.2 | 36.4 | 34.4 | 54.0 | 73.9 | 35.3 | 60.2 | 30.1 | 53.3 | 50.9 |
| 55. TC104646 | 34.4 | 36.3 | 35.7 | 74.4 | 54.6 | 34.2 | 58.1 | 26.3 | 77.6 | 91.2 |
| 56. DV982110 | 34.7 | 38.2 | 41.9 | 45.8 | 45.4 | 37.3 | 43.8 | 29.7 | 46.7 | 45.9 |
| 57. WO051050seqID516 | 38.0 | 37.3 | 29.6 | 33.4 | 35.4 | 40.4 | 36.1 | 29.6 | 34.8 | 33.3 |
| 58. TC68930 | 31.5 | 36.6 | 35.7 | 32.2 | 32.1 | 35.4 | 32.3 | 30.7 | 34.3 | 34.6 |
| 59. TA30646 | 32.0 | 36.7 | 34.4 | 54.7 | 73.9 | 35.5 | 60.2 | 29.5 | 54.9 | 51.2 |
| 60. TA28621 | 33.6 | 39.1 | 37.4 | 51.4 | 56.2 | 35.3 | 63.5 | 28.7 | 53.4 | 52.2 |
| 61. TA34455 | | 61.4 | 30.3 | 35.9 | 33.5 | 50.6 | 35.4 | 32.2 | 34.9 | 34.6 |
| 62. TA37666 | 70.7 | | 32.2 | 39.2 | 36.2 | 52.3 | 38.4 | 30.4 | 37.4 | 37.9 |
| 63. TC253044 | 40.9 | 47.1 | | 34.6 | 36.5 | 33.0 | 37.2 | 30.6 | 35.8 | 35.8 |
| 64. TabHLH11 | 41.6 | 45.5 | 51.4 | | 52.5 | 33.3 | 55.7 | 27.7 | 82.7 | 70.7 |
| 65. TA46156 | 41.6 | 47.6 | 53.8 | 66.4 | | 35.1 | 65.7 | 27.0 | 55.3 | 52.9 |
| 66. GSVIVT00017237001 | 67.1 | 64.4 | 43.5 | 41.9 | 45.9 | | 36.0 | 31.6 | 32.5 | 35.6 |
| 67. TA46194 | 45.2 | 50.5 | 51.1 | 66.1 | 75.7 | 45.0 | | 29.3 | 57.5 | 56.5 |
| 68. GSVIVT00016367001 | 46.8 | 42.7 | 41.4 | 35.1 | 36.1 | 44.5 | 37.5 | | 26.9 | 26.1 |
| 69. TA139285 | 43.2 | 44.0 | 54.8 | 89.5 | 66.4 | 40.0 | 68.1 | 37.3 | | 72.8 |
| 70. TA126400 | 40.7 | 46.1 | 53.8 | 79.6 | 65.1 | 41.9 | 66.5 | 35.7 | 80.4 | |

TABLE E3
MatGAT results for global similarity and identity over the HLH domains of
the bHLH11-like polypeptide sequences.

| | 1 | 2 | 3 | 4 | 5 | 6 | 7 | 8 | 9 |
|---|---|---|---|---|---|---|---|---|---|
| 1. AT2G24260 | | 98.0 | 92.2 | 98.0 | 98.0 | 98.0 | 98.0 | 98.0 | 98.0 |
| 2. AT4G30980 | 100.0 | | 94.1 | 96.1 | 96.1 | 96.1 | 96.1 | 96.1 | 96.1 |
| 3. AT5G58010 | 98.0 | 98.0 | | 92.2 | 92.2 | 92.2 | 92.2 | 92.2 | 92.2 |
| 4. TA12416 | 98.0 | 98.0 | 98.0 | | 100.0 | 100.0 | 100.0 | 100.0 | 100.0 |
| 5. TA5414 | 98.0 | 98.0 | 98.0 | 100.0 | | 100.0 | 100.0 | 100.0 | 100.0 |
| 6. TC205173 | 98.0 | 98.0 | 98.0 | 100.0 | 100.0 | | 100.0 | 100.0 | 100.0 |
| 7. GSVIVT00017237001 | 98.0 | 98.0 | 98.0 | 100.0 | 100.0 | 100.0 | | 100.0 | 100.0 |
| 8. TC7102 | 98.0 | 98.0 | 98.0 | 100.0 | 100.0 | 100.0 | 100.0 | | 100.0 |
| 9. TA34455 | 98.0 | 98.0 | 98.0 | 100.0 | 100.0 | 100.0 | 100.0 | 100.0 | |
| 10. TC7103 | 98.0 | 98.0 | 98.0 | 100.0 | 100.0 | 100.0 | 100.0 | 100.0 | 100.0 |
| 11. TA37666 | 98.0 | 98.0 | 98.0 | 100.0 | 100.0 | 100.0 | 100.0 | 100.0 | 100.0 |
| 12. TC67603 | 96.1 | 96.1 | 96.1 | 98.0 | 98.0 | 98.0 | 98.0 | 98.0 | 98.0 |
| 13. Os06g08500 | 90.2 | 90.2 | 90.2 | 92.2 | 92.2 | 92.2 | 92.2 | 92.2 | 92.2 |
| 14. Os02g55250 | 98.0 | 98.0 | 98.0 | 100.0 | 100.0 | 100.0 | 100.0 | 100.0 | 100.0 |
| 15. Os09g25040 | 88.9 | 88.9 | 88.9 | 90.7 | 90.7 | 90.7 | 90.7 | 90.7 | 90.7 |
| 16. TA2544 | 98.0 | 98.0 | 98.0 | 100.0 | 100.0 | 100.0 | 100.0 | 100.0 | 100.0 |
| 17. DV982110 | 98.0 | 98.0 | 100.0 | 100.0 | 100.0 | 100.0 | 100.0 | 100.0 | 100.0 |
| 18. WO051050seqID516 | 98.0 | 98.0 | 100.0 | 100.0 | 100.0 | 100.0 | 100.0 | 100.0 | 100.0 |
| 19. AT4G02590 | 96.1 | 96.1 | 96.1 | 96.1 | 96.1 | 96.1 | 96.1 | 96.1 | 96.1 |
| 20. TC10015_part | 96.1 | 96.1 | 96.1 | 96.1 | 96.1 | 96.1 | 96.1 | 96.1 | 96.1 |
| 21. AT1G03040 | 96.1 | 96.1 | 96.1 | 96.1 | 96.1 | 96.1 | 96.1 | 96.1 | 96.1 |
| 22. TA13791 | 98.0 | 98.0 | 98.0 | 98.0 | 98.0 | 98.0 | 98.0 | 98.0 | 98.0 |
| 23. TC60118 | 98.0 | 98.0 | 98.0 | 98.0 | 98.0 | 98.0 | 98.0 | 98.0 | 98.0 |
| 24. TC60119 | 94.1 | 94.1 | 94.1 | 94.1 | 94.1 | 94.1 | 94.1 | 94.1 | 94.1 |
| 25. TC61833 | 96.1 | 96.1 | 96.1 | 96.1 | 96.1 | 96.1 | 96.1 | 96.1 | 96.1 |
| 26. TA3392 | 98.0 | 98.0 | 98.0 | 98.0 | 98.0 | 98.0 | 98.0 | 98.0 | 98.0 |
| 27. WO051050seqID1671 | 96.1 | 96.1 | 96.1 | 96.1 | 96.1 | 96.1 | 96.1 | 96.1 | 96.1 |
| 28. Pt_TC63334 | 96.1 | 96.1 | 96.1 | 96.1 | 96.1 | 96.1 | 96.1 | 96.1 | 96.1 |
| 29. TA3263 | 98.0 | 98.0 | 98.0 | 98.0 | 98.0 | 98.0 | 98.0 | 98.0 | 98.0 |
| 30. Pt_scaff_II.416 | 98.0 | 98.0 | 98.0 | 98.0 | 98.0 | 98.0 | 98.0 | 98.0 | 98.0 |
| 31. TA2825 | 98.0 | 98.0 | 98.0 | 98.0 | 98.0 | 98.0 | 98.0 | 98.0 | 98.0 |
| 32. TC207545 | 98.0 | 98.0 | 98.0 | 98.0 | 98.0 | 98.0 | 98.0 | 98.0 | 98.0 |
| 33. TC229602 | 98.0 | 98.0 | 98.0 | 98.0 | 98.0 | 98.0 | 98.0 | 98.0 | 98.0 |
| 34. TA46156 | 98.0 | 98.0 | 98.0 | 98.0 | 98.0 | 98.0 | 98.0 | 98.0 | 98.0 |
| 35. AK247217 | 96.1 | 96.1 | 96.1 | 96.1 | 96.1 | 96.1 | 96.1 | 96.1 | 96.1 |
| 36. TA30646 | 96.1 | 96.1 | 96.1 | 96.1 | 96.1 | 96.1 | 96.1 | 96.1 | 96.1 |
| 37. TC8633 | 96.1 | 96.1 | 96.1 | 96.1 | 96.1 | 96.1 | 96.1 | 96.1 | 96.1 |
| 38. TC15501 | 98.0 | 98.0 | 100.0 | 100.0 | 100.0 | 100.0 | 100.0 | 100.0 | 100.0 |
| 39. TA1140 | 98.0 | 98.0 | 98.0 | 98.0 | 98.0 | 98.0 | 98.0 | 98.0 | 98.0 |
| 40. TA3490_part | 98.0 | 98.0 | 98.0 | 98.0 | 98.0 | 98.0 | 98.0 | 98.0 | 98.0 |
| 41. CK293938 | 98.0 | 98.0 | 98.0 | 98.0 | 98.0 | 98.0 | 98.0 | 98.0 | 98.0 |
| 42. TC12771 | 98.0 | 98.0 | 98.0 | 98.0 | 98.0 | 98.0 | 98.0 | 98.0 | 98.0 |
| 43. TC172581 | 98.0 | 98.0 | 98.0 | 98.0 | 98.0 | 98.0 | 98.0 | 98.0 | 98.0 |
| 44. TA28621 | 98.0 | 98.0 | 98.0 | 98.0 | 98.0 | 98.0 | 98.0 | 98.0 | 98.0 |
| 45. TA21665 | 98.0 | 98.0 | 98.0 | 98.0 | 98.0 | 98.0 | 98.0 | 98.0 | 98.0 |
| 46. TA46194 | 98.0 | 98.0 | 100.0 | 100.0 | 100.0 | 100.0 | 100.0 | 100.0 | 100.0 |
| 47. DY268946 | 98.0 | 98.0 | 98.0 | 98.0 | 98.0 | 98.0 | 98.0 | 98.0 | 98.0 |
| 48. CO123623 | 98.0 | 98.0 | 98.0 | 98.0 | 98.0 | 98.0 | 98.0 | 98.0 | 98.0 |
| 49. Pt_scaff_70.65 | 92.2 | 92.2 | 92.2 | 92.2 | 92.2 | 92.2 | 92.2 | 92.2 | 92.2 |
| 50. Pt_scaff_XIII.403 | 92.2 | 92.2 | 92.2 | 92.2 | 92.2 | 92.2 | 92.2 | 92.2 | 92.2 |
| 51. TA1616 | 96.1 | 96.1 | 96.1 | 98.0 | 98.0 | 98.0 | 98.0 | 98.0 | 98.0 |
| 52. TA55042 | 98.0 | 98.0 | 98.0 | 98.0 | 98.0 | 98.0 | 98.0 | 98.0 | 98.0 |
| 53. WO051050seqID77 | 96.1 | 96.1 | 96.1 | 96.1 | 96.1 | 96.1 | 96.1 | 96.1 | 96.1 |
| 54. TC3698 | 96.1 | 96.1 | 98.0 | 96.1 | 96.1 | 96.1 | 96.1 | 96.1 | 96.1 |
| 55. Os03g58330 | 98.0 | 98.0 | 100.0 | 98.0 | 98.0 | 98.0 | 98.0 | 98.0 | 98.0 |
| 56. TA139285 | 98.0 | 98.0 | 100.0 | 98.0 | 98.0 | 98.0 | 98.0 | 98.0 | 98.0 |
| 57. TabHLH11 | 96.1 | 96.1 | 98.0 | 96.1 | 96.1 | 96.1 | 96.1 | 96.1 | 96.1 |
| 58. TC104646 | 98.0 | 98.0 | 100.0 | 98.0 | 98.0 | 98.0 | 98.0 | 98.0 | 98.0 |
| 59. TA126400 | 98.0 | 98.0 | 100.0 | 98.0 | 98.0 | 98.0 | 98.0 | 98.0 | 98.0 |
| 60. Os07g08440 | 98.0 | 98.0 | 100.0 | 98.0 | 98.0 | 98.0 | 98.0 | 98.0 | 98.0 |
| 61. Os02g35660 | 96.1 | 96.1 | 98.0 | 98.0 | 98.0 | 98.0 | 98.0 | 98.0 | 98.0 |
| 62. DT543504 | 94.1 | 96.1 | 98.0 | 96.1 | 96.1 | 96.1 | 96.1 | 96.1 | 96.1 |
| 63. Pt_scaff28.86 | 94.1 | 96.1 | 98.0 | 96.1 | 96.1 | 96.1 | 96.1 | 96.1 | 96.1 |
| 64. GSVIVT00016367001 | 96.1 | 98.0 | 100.0 | 98.0 | 98.0 | 98.0 | 98.0 | 98.0 | 98.0 |
| 65. TC19278 | 68.6 | 70.6 | 72.5 | 70.6 | 70.6 | 70.6 | 70.6 | 70.6 | 70.6 |
| 66. TA14134 | 94.1 | 94.1 | 94.1 | 96.1 | 96.1 | 96.1 | 96.1 | 96.1 | 96.1 |
| 67. TC68930 | 98.0 | 98.0 | 100.0 | 100.0 | 100.0 | 100.0 | 100.0 | 100.0 | 100.0 |
| 68. TC140470 | 94.1 | 96.1 | 98.0 | 96.1 | 96.1 | 96.1 | 96.1 | 96.1 | 96.1 |
| 69. TC253044 | 94.1 | 96.1 | 98.0 | 96.1 | 96.1 | 96.1 | 96.1 | 96.1 | 96.1 |
| 70. Os06g09370 | 92.2 | 94.1 | 96.1 | 94.1 | 94.1 | 94.1 | 94.1 | 94.1 | 94.1 |
| | 10 | 11 | 12 | 13 | 14 | 15 | 16 | 17 | 18 |
| 1. AT2G24260 | 94.1 | 94.1 | 96.1 | 86.3 | 98.0 | 88.9 | 96.1 | 98.0 | 98.0 |
| 2. AT4G30980 | 96.1 | 96.1 | 94.1 | 88.2 | 96.1 | 87.0 | 94.1 | 96.1 | 96.1 |
| 3. AT5G58010 | 96.1 | 96.1 | 90.2 | 84.3 | 92.2 | 83.3 | 90.2 | 92.2 | 92.2 |
| 4. TA12416 | 96.1 | 96.1 | 98.0 | 88.2 | 100.0 | 90.7 | 98.0 | 98.0 | 98.0 |
| 5. TA5414 | 96.1 | 96.1 | 98.0 | 88.2 | 100.0 | 90.7 | 98.0 | 98.0 | 98.0 |
| 6. TC205173 | 96.1 | 96.1 | 98.0 | 88.2 | 100.0 | 90.7 | 98.0 | 98.0 | 98.0 |
| 7. GSVIVT00017237001 | 96.1 | 96.1 | 98.0 | 88.2 | 100.0 | 90.7 | 98.0 | 98.0 | 98.0 |
| 8. TC7102 | 96.1 | 96.1 | 98.0 | 88.2 | 100.0 | 90.7 | 98.0 | 98.0 | 98.0 |
| 9. TA34455 | 96.1 | 96.1 | 98.0 | 88.2 | 100.0 | 90.7 | 98.0 | 98.0 | 98.0 |
| 10. TC7103 | | 100.0 | 94.1 | 88.2 | 96.1 | 87.0 | 94.1 | 94.1 | 94.1 |
| 11. TA37666 | 100.0 | | 94.1 | 88.2 | 96.1 | 87.0 | 94.1 | 94.1 | 94.1 |
| 12. TC67603 | 98.0 | 98.0 | | 86.3 | 98.0 | 88.9 | 96.1 | 96.1 | 96.1 |
| 13. Os06g08500 | 92.2 | 92.2 | 90.2 | | 88.2 | 79.6 | 86.3 | 86.3 | 86.3 |
| 14. Os02g55250 | 100.0 | 100.0 | 98.0 | 92.2 | | 90.7 | 98.0 | 98.0 | 98.0 |
| 15. Os09g25040 | 90.7 | 90.7 | 88.9 | 83.3 | 90.7 | | 88.9 | 88.9 | 88.9 |
| 16. TA2544 | 100.0 | 100.0 | 98.0 | 92.2 | 100.0 | 90.7 | | 96.1 | 96.1 |
| 17. DV982110 | 100.0 | 100.0 | 98.0 | 92.2 | 100.0 | 90.7 | 100.0 | | 100.0 |
| 18. WO051050seqID516 | 100.0 | 100.0 | 98.0 | 92.2 | 100.0 | 90.7 | 100.0 | 100.0 | |
| 19. AT4G02590 | 96.1 | 96.1 | 94.1 | 88.2 | 96.1 | 87.0 | 96.1 | 96.1 | 96.1 |
| 20. TC10015_part | 96.1 | 96.1 | 94.1 | 88.2 | 96.1 | 87.0 | 96.1 | 96.1 | 96.1 |
| 21. AT1G03040 | 96.1 | 96.1 | 94.1 | 88.2 | 96.1 | 87.0 | 96.1 | 96.1 | 96.1 |
| 22. TA13791 | 98.0 | 98.0 | 96.1 | 90.2 | 98.0 | 88.9 | 98.0 | 98.0 | 98.0 |
| 23. TC60118 | 98.0 | 98.0 | 96.1 | 90.2 | 98.0 | 88.9 | 98.0 | 98.0 | 98.0 |
| 24. TC60119 | 94.1 | 94.1 | 92.2 | 86.3 | 94.1 | 85.2 | 94.1 | 94.1 | 94.1 |
| 25. TC61833 | 96.1 | 96.1 | 94.1 | 88.2 | 96.1 | 87.0 | 96.1 | 96.1 | 96.1 |
| 26. TA3392 | 98.0 | 98.0 | 96.1 | 90.2 | 98.0 | 88.9 | 98.0 | 98.0 | 98.0 |
| 27. WO051050seqID1671 | 96.1 | 96.1 | 94.1 | 88.2 | 96.1 | 87.0 | 96.1 | 96.1 | 96.1 |
| 28. Pt_TC63334 | 96.1 | 96.1 | 94.1 | 88.2 | 96.1 | 87.0 | 96.1 | 96.1 | 96.1 |
| 29. TA3263 | 98.0 | 98.0 | 96.1 | 90.2 | 98.0 | 88.9 | 98.0 | 98.0 | 98.0 |
| 30. Pt_scaff_II.416 | 98.0 | 98.0 | 96.1 | 90.2 | 98.0 | 88.9 | 98.0 | 98.0 | 98.0 |
| 31. TA2825 | 98.0 | 98.0 | 96.1 | 90.2 | 98.0 | 88.9 | 98.0 | 98.0 | 98.0 |
| 32. TC207545 | 98.0 | 98.0 | 96.1 | 90.2 | 98.0 | 88.9 | 98.0 | 98.0 | 98.0 |
| 33. TC229602 | 98.0 | 98.0 | 96.1 | 90.2 | 98.0 | 88.9 | 98.0 | 98.0 | 98.0 |
| 34. TA46156 | 98.0 | 98.0 | 96.1 | 90.2 | 98.0 | 88.9 | 98.0 | 98.0 | 98.0 |
| 35. AK247217 | 96.1 | 96.1 | 94.1 | 88.2 | 96.1 | 87.0 | 96.1 | 96.1 | 96.1 |
| 36. TA30646 | 96.1 | 96.1 | 94.1 | 88.2 | 96.1 | 87.0 | 96.1 | 96.1 | 96.1 |
| 37. TC8633 | 96.1 | 96.1 | 94.1 | 88.2 | 96.1 | 87.0 | 96.1 | 96.1 | 96.1 |
| 38. TC15501 | 100.0 | 100.0 | 98.0 | 92.2 | 100.0 | 90.7 | 100.0 | 100.0 | 100.0 |
| 39. TA1140 | 98.0 | 98.0 | 96.1 | 90.2 | 98.0 | 88.9 | 98.0 | 98.0 | 98.0 |
| 40. TA3490_part | 98.0 | 98.0 | 96.1 | 90.2 | 98.0 | 88.9 | 98.0 | 98.0 | 98.0 |
| 41. CK293938 | 98.0 | 98.0 | 96.1 | 90.2 | 98.0 | 88.9 | 98.0 | 98.0 | 98.0 |
| 42. TC12771 | 98.0 | 98.0 | 96.1 | 90.2 | 98.0 | 88.9 | 98.0 | 98.0 | 98.0 |
| 43. TC172581 | 98.0 | 98.0 | 96.1 | 90.2 | 98.0 | 88.9 | 98.0 | 98.0 | 98.0 |
| 44. TA28621 | 98.0 | 98.0 | 96.1 | 90.2 | 98.0 | 88.9 | 98.0 | 98.0 | 98.0 |
| 45. TA21665 | 98.0 | 98.0 | 96.1 | 90.2 | 98.0 | 88.9 | 98.0 | 98.0 | 98.0 |
| 46. TA46194 | 100.0 | 100.0 | 98.0 | 92.2 | 100.0 | 90.7 | 100.0 | 100.0 | 100.0 |
| 47. DY268946 | 98.0 | 98.0 | 96.1 | 90.2 | 98.0 | 88.9 | 98.0 | 98.0 | 98.0 |
| 48. CO123623 | 98.0 | 98.0 | 96.1 | 90.2 | 98.0 | 88.9 | 98.0 | 98.0 | 98.0 |
| 49. Pt_scaff_70.65 | 92.2 | 92.2 | 94.1 | 84.3 | 92.2 | 83.3 | 92.2 | 92.2 | 92.2 |
| 50. Pt_scaff_XIII.403 | 92.2 | 92.2 | 94.1 | 84.3 | 92.2 | 83.3 | 92.2 | 92.2 | 92.2 |
| 51. TA1616 | 98.0 | 98.0 | 96.1 | 90.2 | 98.0 | 88.9 | 98.0 | 98.0 | 98.0 |
| 52. TA55042 | 98.0 | 98.0 | 96.1 | 90.2 | 98.0 | 88.9 | 98.0 | 98.0 | 98.0 |
| 53. WO051050seqID77 | 96.1 | 96.1 | 94.1 | 88.2 | 96.1 | 87.0 | 96.1 | 96.1 | 96.1 |
| 54. TC3698 | 96.1 | 96.1 | 94.1 | 88.2 | 96.1 | 87.0 | 96.1 | 98.0 | 98.0 |
| 55. Os03g58330 | 98.0 | 98.0 | 96.1 | 90.2 | 98.0 | 88.9 | 98.0 | 100.0 | 100.0 |
| 56. TA139285 | 98.0 | 98.0 | 96.1 | 90.2 | 98.0 | 88.9 | 98.0 | 100.0 | 100.0 |
| 57. TabHLH11 | 96.1 | 96.1 | 94.1 | 88.2 | 96.1 | 87.0 | 96.1 | 98.0 | 98.0 |
| 58. TC104646 | 98.0 | 98.0 | 96.1 | 90.2 | 98.0 | 88.9 | 98.0 | 100.0 | 100.0 |
| 59. TA126400 | 98.0 | 98.0 | 96.1 | 90.2 | 98.0 | 88.9 | 98.0 | 100.0 | 100.0 |
| 60. Os07g08440 | 98.0 | 98.0 | 96.1 | 90.2 | 98.0 | 88.9 | 98.0 | 100.0 | 100.0 |
| 61. Os02g35660 | 98.0 | 98.0 | 96.1 | 90.2 | 98.0 | 88.9 | 98.0 | 98.0 | 98.0 |
| 62. DT543504 | 98.0 | 98.0 | 94.1 | 90.2 | 96.1 | 87.0 | 96.1 | 96.1 | 96.1 |
| 63. Pt_scaff28.86 | 98.0 | 98.0 | 94.1 | 90.2 | 96.1 | 88.9 | 96.1 | 96.1 | 96.1 |
| 64. GSVIVT00016367001 | 100.0 | 100.0 | 96.1 | 92.2 | 98.0 | 88.9 | 98.0 | 98.0 | 98.0 |
| 65. TC19278 | 72.5 | 72.5 | 70.6 | 72.5 | 70.6 | 63.0 | 70.6 | 70.6 | 70.6 |
| 66. TA14134 | 96.1 | 96.1 | 94.1 | 88.2 | 96.1 | 87.0 | 96.1 | 96.1 | 96.1 |
| 67. TC68930 | 100.0 | 100.0 | 98.0 | 92.2 | 100.0 | 90.7 | 100.0 | 100.0 | 100.0 |
| 68. TC140470 | 98.0 | 98.0 | 94.1 | 90.2 | 96.1 | 87.0 | 96.1 | 96.1 | 96.1 |
| 69. TC253044 | 98.0 | 98.0 | 94.1 | 90.2 | 96.1 | 87.0 | 96.1 | 96.1 | 96.1 |
| 70. Os06g09370 | 96.1 | 96.1 | 92.2 | 88.2 | 94.1 | 85.2 | 94.1 | 94.1 | 94.1 |
| | 19 | 20 | 21 | 22 | 23 | 24 | 25 | 26 | 27 |
| 1. AT2G24260 | 82.4 | 82.4 | 80.4 | 84.3 | 84.3 | 82.4 | 84.3 | 84.3 | 80.4 |
| 2. AT4G30980 | 80.4 | 80.4 | 82.4 | 82.4 | 82.4 | 80.4 | 82.4 | 82.4 | 80.4 |
| 3. AT5G58010 | 76.5 | 76.5 | 78.4 | 78.4 | 78.4 | 76.5 | 78.4 | 78.4 | 76.5 |
| 4. TA12416 | 82.4 | 82.4 | 80.4 | 84.3 | 84.3 | 82.4 | 84.3 | 84.3 | 80.4 |
| 5. TA5414 | 82.4 | 82.4 | 80.4 | 84.3 | 84.3 | 82.4 | 84.3 | 84.3 | 80.4 |
| 6. TC205173 | 82.4 | 82.4 | 80.4 | 84.3 | 84.3 | 82.4 | 84.3 | 84.3 | 80.4 |
| 7. GSVIVT00017237001 | 82.4 | 82.4 | 80.4 | 84.3 | 84.3 | 82.4 | 84.3 | 84.3 | 80.4 |
| 8. TC7102 | 82.4 | 82.4 | 80.4 | 84.3 | 84.3 | 82.4 | 84.3 | 84.3 | 80.4 |
| 9. TA34455 | 82.4 | 82.4 | 80.4 | 84.3 | 84.3 | 82.4 | 84.3 | 84.3 | 80.4 |
| 10. TC7103 | 78.4 | 78.4 | 80.4 | 80.4 | 80.4 | 78.4 | 80.4 | 80.4 | 78.4 |
| 11. TA37666 | 78.4 | 78.4 | 80.4 | 80.4 | 80.4 | 78.4 | 80.4 | 80.4 | 78.4 |
| 12. TC67603 | 80.4 | 80.4 | 78.4 | 82.4 | 82.4 | 80.4 | 82.4 | 82.4 | 78.4 |
| 13. Os06g08500 | 70.6 | 70.6 | 72.5 | 72.5 | 72.5 | 70.6 | 72.5 | 72.5 | 70.6 |
| 14. Os02g55250 | 82.4 | 82.4 | 80.4 | 84.3 | 84.3 | 82.4 | 84.3 | 84.3 | 80.4 |
| 15. Os09g25040 | 74.1 | 74.1 | 72.2 | 75.9 | 75.9 | 74.1 | 75.9 | 75.9 | 72.2 |
| 16. TA2544 | 80.4 | 80.4 | 78.4 | 82.4 | 82.4 | 80.4 | 82.4 | 82.4 | 78.4 |
| 17. DV982110 | 82.4 | 82.4 | 80.4 | 84.3 | 84.3 | 82.4 | 84.3 | 84.3 | 80.4 |
| 18. WO051050seqID516 | 82.4 | 82.4 | 80.4 | 84.3 | 84.3 | 82.4 | 84.3 | 84.3 | 80.4 |
| 19. AT4G02590 | | 100.0 | 98.0 | 96.1 | 96.1 | 92.2 | 94.1 | 96.1 | 92.2 |
| 20. TC10015_part | 100.0 | | 98.0 | 96.1 | 96.1 | 92.2 | 94.1 | 96.1 | 92.2 |
| 21. AT1G03040 | 100.0 | 100.0 | | 94.1 | 94.1 | 90.2 | 92.2 | 94.1 | 92.2 |
| 22. TA13791 | 100.0 | 100.0 | 100.0 | | 100.0 | 96.1 | 98.0 | 100.0 | 96.1 |
| 23. TC60118 | 100.0 | 100.0 | 100.0 | 100.0 | | 96.1 | 98.0 | 100.0 | 96.1 |
| 24. TC60119 | 96.1 | 96.1 | 96.1 | 96.1 | 96.1 | | 98.0 | 96.1 | 92.2 |
| 25. TC61833 | 98.0 | 98.0 | 98.0 | 98.0 | 98.0 | 98.0 | | 98.0 | 94.1 |
| 26. TA3392 | 100.0 | 100.0 | 100.0 | 100.0 | 100.0 | 96.1 | 98.0 | | 96.1 |
| 27. WO051050seqID1671 | 98.0 | 98.0 | 98.0 | 98.0 | 98.0 | 94.1 | 96.1 | 98.0 | |
| 28. Pt_TC63334 | 96.1 | 96.1 | 96.1 | 96.1 | 96.1 | 94.1 | 96.1 | 96.1 | 94.1 |
| 29. TA3263 | 98.0 | 98.0 | 98.0 | 98.0 | 98.0 | 96.1 | 98.0 | 98.0 | 96.1 |
| 30. Pt_scaff_II.416 | 100.0 | 100.0 | 100.0 | 100.0 | 100.0 | 96.1 | 98.0 | 100.0 | 98.0 |
| 31. TA2825 | 100.0 | 100.0 | 100.0 | 100.0 | 100.0 | 96.1 | 98.0 | 100.0 | 98.0 |
| 32. TC207545 | 100.0 | 100.0 | 100.0 | 100.0 | 100.0 | 96.1 | 98.0 | 100.0 | 98.0 |
| 33. TC229602 | 100.0 | 100.0 | 100.0 | 100.0 | 100.0 | 96.1 | 98.0 | 100.0 | 98.0 |
| 34. TA46156 | 100.0 | 100.0 | 100.0 | 100.0 | 100.0 | 96.1 | 98.0 | 100.0 | 98.0 |
| 35. AK247217 | 98.0 | 98.0 | 98.0 | 98.0 | 98.0 | 98.0 | 100.0 | 98.0 | 96.1 |
| 36. TA30646 | 98.0 | 98.0 | 98.0 | 98.0 | 98.0 | 98.0 | 100.0 | 98.0 | 96.1 |
| 37. TC8633 | 96.1 | 96.1 | 96.1 | 98.0 | 98.0 | 98.0 | 100.0 | 98.0 | 96.1 |
| 38. TC15501 | 98.0 | 98.0 | 98.0 | 98.0 | 98.0 | 94.1 | 96.1 | 98.0 | 96.1 |
| 39. TA1140 | 98.0 | 98.0 | 98.0 | 98.0 | 98.0 | 94.1 | 96.1 | 98.0 | 96.1 |
| 40. TA3490_part | 98.0 | 98.0 | 98.0 | 98.0 | 98.0 | 94.1 | 96.1 | 98.0 | 96.1 |
| 41. CK293938 | 98.0 | 98.0 | 98.0 | 98.0 | 98.0 | 96.1 | 96.1 | 98.0 | 96.1 |
| 42. TC12771 | 98.0 | 98.0 | 98.0 | 98.0 | 98.0 | 96.1 | 96.1 | 98.0 | 96.1 |
| 43. TC172581 | 98.0 | 98.0 | 98.0 | 98.0 | 98.0 | 96.1 | 96.1 | 98.0 | 96.1 |
| 44. TA28621 | 98.0 | 98.0 | 98.0 | 98.0 | 98.0 | 96.1 | 96.1 | 98.0 | 96.1 |
| 45. TA21665 | 98.0 | 98.0 | 98.0 | 98.0 | 98.0 | 96.1 | 96.1 | 98.0 | 96.1 |
| 46. TA46194 | 98.0 | 98.0 | 98.0 | 98.0 | 98.0 | 94.1 | 96.1 | 98.0 | 96.1 |
| 47. DY268946 | 98.0 | 98.0 | 98.0 | 98.0 | 98.0 | 94.1 | 96.1 | 98.0 | 96.1 |
| 48. CO123623 | 98.0 | 98.0 | 98.0 | 98.0 | 98.0 | 94.1 | 96.1 | 98.0 | 96.1 |
| 49. Pt_scaff_70.65 | 94.1 | 94.1 | 94.1 | 94.1 | 94.1 | 94.1 | 92.2 | 94.1 | 92.2 |
| 50. Pt_scaff_XIII.403 | 94.1 | 94.1 | 94.1 | 94.1 | 94.1 | 94.1 | 92.2 | 94.1 | 92.2 |
| 51. TA1616 | 98.0 | 98.0 | 98.0 | 98.0 | 98.0 | 94.1 | 96.1 | 98.0 | 96.1 |
| 52. TA55042 | 100.0 | 100.0 | 100.0 | 100.0 | 100.0 | 96.1 | 98.0 | 100.0 | 98.0 |
| 53. WO051050seqID77 | 96.1 | 96.1 | 96.1 | 96.1 | 96.1 | 94.1 | 94.1 | 96.1 | 94.1 |
| 54. TC3698 | 96.1 | 96.1 | 96.1 | 96.1 | 96.1 | 96.1 | 98.0 | 96.1 | 94.1 |
| 55. Os03g58330 | 96.1 | 96.1 | 96.1 | 98.0 | 98.0 | 94.1 | 96.1 | 98.0 | 96.1 |
| 56. TA139285 | 96.1 | 96.1 | 96.1 | 98.0 | 98.0 | 94.1 | 96.1 | 98.0 | 96.1 |
| 57. TabHLH11 | 94.1 | 94.1 | 94.1 | 96.1 | 96.1 | 96.1 | 98.0 | 96.1 | 94.1 |
| 58. TC104646 | 96.1 | 96.1 | 96.1 | 98.0 | 98.0 | 94.1 | 96.1 | 98.0 | 96.1 |
| 59. TA126400 | 96.1 | 96.1 | 96.1 | 98.0 | 98.0 | 94.1 | 96.1 | 98.0 | 96.1 |
| 60. Os07g08440 | 96.1 | 96.1 | 96.1 | 98.0 | 98.0 | 94.1 | 96.1 | 98.0 | 96.1 |
| 61. Os02g35660 | 94.1 | 94.1 | 94.1 | 96.1 | 96.1 | 94.1 | 94.1 | 96.1 | 96.1 |
| 62. DT543504 | 92.2 | 92.2 | 94.1 | 94.1 | 94.1 | 90.2 | 92.2 | 94.1 | 94.1 |
| 63. Pt_scaff28.86 | 92.2 | 92.2 | 94.1 | 94.1 | 94.1 | 90.2 | 92.2 | 94.1 | 94.1 |
| 64. GSVIVT00016367001 | 94.1 | 94.1 | 96.1 | 96.1 | 96.1 | 92.2 | 94.1 | 96.1 | 96.1 |
| 65. TC19278 | 66.7 | 66.7 | 68.6 | 68.6 | 68.6 | 66.7 | 66.7 | 68.6 | 68.6 |
| 66. TA14134 | 92.2 | 92.2 | 92.2 | 94.1 | 94.1 | 90.2 | 92.2 | 94.1 | 92.2 |
| 67. TC68930 | 96.1 | 96.1 | 96.1 | 98.0 | 98.0 | 94.1 | 96.1 | 98.0 | 96.1 |
| 68. TC140470 | 92.2 | 92.2 | 94.1 | 94.1 | 94.1 | 92.2 | 92.2 | 94.1 | 94.1 |
| 69. TC253044 | 92.2 | 92.2 | 94.1 | 94.1 | 94.1 | 92.2 | 92.2 | 94.1 | 94.1 |
| 70. Os06g09370 | 90.2 | 90.2 | 92.2 | 92.2 | 92.2 | 90.2 | 90.2 | 92.2 | 92.2 |
| | 28 | 29 | 30 | 31 | 32 | 33 | 34 | 35 | 36 |
| 1. AT2G24260 | 82.4 | 84.3 | 82.4 | 84.3 | 84.3 | 84.3 | 84.3 | 82.4 | 84.3 |
| 2. AT4G30980 | 80.4 | 82.4 | 80.4 | 82.4 | 82.4 | 82.4 | 82.4 | 80.4 | 82.4 |
| 3. AT5G58010 | 76.5 | 78.4 | 76.5 | 78.4 | 78.4 | 78.4 | 78.4 | 76.5 | 78.4 |
| 4. TA12416 | 82.4 | 84.3 | 82.4 | 84.3 | 84.3 | 84.3 | 84.3 | 82.4 | 84.3 |
| 5. TA5414 | 82.4 | 84.3 | 82.4 | 84.3 | 84.3 | 84.3 | 84.3 | 82.4 | 84.3 |
| 6. TC205173 | 82.4 | 84.3 | 82.4 | 84.3 | 84.3 | 84.3 | 84.3 | 82.4 | 84.3 |
| 7. GSVIVT00017237001 | 82.4 | 84.3 | 82.4 | 84.3 | 84.3 | 84.3 | 84.3 | 82.4 | 84.3 |
| 8. TC7102 | 82.4 | 84.3 | 82.4 | 84.3 | 84.3 | 84.3 | 84.3 | 82.4 | 84.3 |
| 9. TA34455 | 82.4 | 84.3 | 82.4 | 84.3 | 84.3 | 84.3 | 84.3 | 82.4 | 84.3 |
| 10. TC7103 | 78.4 | 80.4 | 78.4 | 80.4 | 80.4 | 80.4 | 80.4 | 78.4 | 80.4 |
| 11. TA37666 | 78.4 | 80.4 | 78.4 | 80.4 | 80.4 | 80.4 | 80.4 | 78.4 | 80.4 |
| 12. TC67603 | 80.4 | 82.4 | 80.4 | 82.4 | 82.4 | 82.4 | 82.4 | 80.4 | 82.4 |
| 13. Os06g08500 | 70.6 | 72.5 | 70.6 | 72.5 | 72.5 | 72.5 | 72.5 | 70.6 | 72.5 |
| 14. Os02g55250 | 82.4 | 84.3 | 82.4 | 84.3 | 84.3 | 84.3 | 84.3 | 82.4 | 84.3 |
| 15. Os09g25040 | 74.1 | 75.9 | 75.9 | 75.9 | 75.9 | 75.9 | 75.9 | 74.1 | 75.9 |
| 16. TA2544 | 80.4 | 82.4 | 80.4 | 82.4 | 82.4 | 82.4 | 82.4 | 82.4 | 82.4 |
| 17. DV982110 | 82.4 | 84.3 | 82.4 | 84.3 | 84.3 | 84.3 | 84.3 | 82.4 | 84.3 |
| 18. WO051050seqID516 | 82.4 | 84.3 | 82.4 | 84.3 | 84.3 | 84.3 | 84.3 | 82.4 | 84.3 |
| 19. AT4G02590 | 92.2 | 94.1 | 94.1 | 96.1 | 96.1 | 96.1 | 96.1 | 92.2 | 94.1 |
| 20. TC10015_part | 92.2 | 94.1 | 94.1 | 96.1 | 96.1 | 96.1 | 96.1 | 92.2 | 94.1 |
| 21. AT1G03040 | 90.2 | 92.2 | 92.2 | 94.1 | 94.1 | 94.1 | 94.1 | 90.2 | 92.2 |
| 22. TA13791 | 96.1 | 98.0 | 98.0 | 100.0 | 100.0 | 100.0 | 100.0 | 96.1 | 98.0 |
| 23. TC60118 | 96.1 | 98.0 | 98.0 | 100.0 | 100.0 | 100.0 | 100.0 | 96.1 | 98.0 |
| 24. TC60119 | 94.1 | 96.1 | 94.1 | 96.1 | 96.1 | 96.1 | 96.1 | 96.1 | 98.0 |
| 25. TC61833 | 96.1 | 98.0 | 96.1 | 98.0 | 98.0 | 98.0 | 98.0 | 98.0 | 100.0 |
| 26. TA3392 | 96.1 | 98.0 | 98.0 | 100.0 | 100.0 | 100.0 | 100.0 | 96.1 | 98.0 |
| 27. WO051050seqID1671 | 92.2 | 94.1 | 94.1 | 96.1 | 96.1 | 96.1 | 96.1 | 92.2 | 94.1 |
| 28. Pt_TC63334 | | 98.0 | 94.1 | 96.1 | 96.1 | 96.1 | 96.1 | 94.1 | 96.1 |
| 29. TA3263 | 98.0 | | 96.1 | 98.0 | 98.0 | 98.0 | 98.0 | 96.1 | 98.0 |
| 30. Pt_scaff_II.416 | 96.1 | 98.0 | | 98.0 | 98.0 | 98.0 | 98.0 | 94.1 | 96.1 |
| 31. TA2825 | 96.1 | 98.0 | 100.0 | | 100.0 | 100.0 | 100.0 | 96.1 | 98.0 |
| 32. TC207545 | 96.1 | 98.0 | 100.0 | 100.0 | | 100.0 | 100.0 | 96.1 | 98.0 |
| 33. TC229602 | 96.1 | 98.0 | 100.0 | 100.0 | 100.0 | | 100.0 | 96.1 | 98.0 |
| 34. TA46156 | 96.1 | 98.0 | 100.0 | 100.0 | 100.0 | 100.0 | | 96.1 | 98.0 |
| 35. AK247217 | 96.1 | 98.0 | 98.0 | 98.0 | 98.0 | 98.0 | 98.0 | | 98.0 |
| 36. TA30646 | 96.1 | 98.0 | 98.0 | 98.0 | 98.0 | 98.0 | 98.0 | 100.0 | |
| 37. TC8633 | 96.1 | 98.0 | 98.0 | 98.0 | 98.0 | 98.0 | 98.0 | 100.0 | 100.0 |
| 38. TC15501 | 94.1 | 96.1 | 98.0 | 98.0 | 98.0 | 98.0 | 98.0 | 96.1 | 96.1 |
| 39. TA1140 | 94.1 | 96.1 | 98.0 | 98.0 | 98.0 | 98.0 | 98.0 | 96.1 | 96.1 |
| 40. TA3490_part | 94.1 | 96.1 | 98.0 | 98.0 | 98.0 | 98.0 | 98.0 | 96.1 | 96.1 |
| 41. CK293938 | 94.1 | 96.1 | 98.0 | 98.0 | 98.0 | 98.0 | 98.0 | 96.1 | 96.1 |
| 42. TC12771 | 94.1 | 96.1 | 98.0 | 98.0 | 98.0 | 98.0 | 98.0 | 96.1 | 96.1 |
| 43. TC172581 | 94.1 | 96.1 | 98.0 | 98.0 | 98.0 | 98.0 | 98.0 | 96.1 | 96.1 |
| 44. TA28621 | 94.1 | 96.1 | 98.0 | 98.0 | 98.0 | 98.0 | 98.0 | 96.1 | 96.1 |
| 45. TA21665 | 94.1 | 96.1 | 98.0 | 98.0 | 98.0 | 98.0 | 98.0 | 96.1 | 96.1 |
| 46. TA46194 | 94.1 | 96.1 | 98.0 | 98.0 | 98.0 | 98.0 | 98.0 | 96.1 | 96.1 |
| 47. DY268946 | 94.1 | 96.1 | 98.0 | 98.0 | 98.0 | 98.0 | 98.0 | 96.1 | 96.1 |
| 48. CO123623 | 94.1 | 96.1 | 98.0 | 98.0 | 98.0 | 98.0 | 98.0 | 96.1 | 96.1 |
| 49. Pt_scaff_70.65 | 90.2 | 92.2 | 94.1 | 94.1 | 94.1 | 94.1 | 94.1 | 92.2 | 92.2 |
| 50. Pt_scaff_XIII.403 | 90.2 | 92.2 | 94.1 | 94.1 | 94.1 | 94.1 | 94.1 | 92.2 | 92.2 |
| 51. TA1616 | 94.1 | 96.1 | 98.0 | 98.0 | 98.0 | 98.0 | 98.0 | 96.1 | 96.1 |
| 52. TA55042 | 96.1 | 98.0 | 100.0 | 100.0 | 100.0 | 100.0 | 100.0 | 98.0 | 98.0 |
| 53. WO051050seqID77 | 92.2 | 94.1 | 96.1 | 96.1 | 96.1 | 96.1 | 96.1 | 94.1 | 94.1 |
| 54. TC3698 | 94.1 | 96.1 | 96.1 | 96.1 | 96.1 | 96.1 | 96.1 | 98.0 | 98.0 |
| 55. Os03g58330 | 94.1 | 96.1 | 98.0 | 98.0 | 98.0 | 98.0 | 98.0 | 96.1 | 96.1 |
| 56. TA139285 | 94.1 | 96.1 | 98.0 | 98.0 | 98.0 | 98.0 | 98.0 | 96.1 | 96.1 |
| 57. TabHLH11 | 94.1 | 96.1 | 96.1 | 96.1 | 96.1 | 96.1 | 96.1 | 98.0 | 98.0 |
| 58. TC104646 | 94.1 | 96.1 | 98.0 | 98.0 | 98.0 | 98.0 | 98.0 | 96.1 | 96.1 |
| 59. TA126400 | 94.1 | 96.1 | 98.0 | 98.0 | 98.0 | 98.0 | 98.0 | 96.1 | 96.1 |
| 60. Os07g08440 | 94.1 | 96.1 | 98.0 | 98.0 | 98.0 | 98.0 | 98.0 | 96.1 | 96.1 |
| 61. Os02g35660 | 94.1 | 96.1 | 96.1 | 96.1 | 96.1 | 96.1 | 96.1 | 94.1 | 94.1 |
| 62. DT543504 | 92.2 | 94.1 | 94.1 | 94.1 | 94.1 | 94.1 | 94.1 | 92.2 | 92.2 |
| 63. Pt_scaff28.86 | 92.2 | 94.1 | 94.1 | 94.1 | 94.1 | 94.1 | 94.1 | 92.2 | 92.2 |
| 64. GSVIVT00016367001 | 94.1 | 96.1 | 96.1 | 96.1 | 96.1 | 96.1 | 96.1 | 94.1 | 94.1 |
| 65. TC19278 | 66.7 | 68.6 | 68.6 | 68.6 | 68.6 | 68.6 | 68.6 | 66.7 | 66.7 |
| 66. TA14134 | 92.2 | 94.1 | 94.1 | 94.1 | 94.1 | 94.1 | 94.1 | 92.2 | 92.2 |
| 67. TC68930 | 96.1 | 98.0 | 98.0 | 98.0 | 98.0 | 98.0 | 98.0 | 96.1 | 96.1 |
| 68. TC140470 | 92.2 | 94.1 | 94.1 | 94.1 | 94.1 | 94.1 | 94.1 | 92.2 | 92.2 |
| 69. TC253044 | 92.2 | 94.1 | 94.1 | 94.1 | 94.1 | 94.1 | 94.1 | 92.2 | 92.2 |
| 70. Os06g09370 | 90.2 | 92.2 | 92.2 | 92.2 | 92.2 | 92.2 | 92.2 | 90.2 | 90.2 |
| | 37 | 38 | 39 | 40 | 41 | 42 | 43 | 44 | 45 |
| 1. AT2G24260 | 86.3 | 88.2 | 88.2 | 88.2 | 84.3 | 84.3 | 84.3 | 84.3 | 84.3 |
| 2. AT4G30980 | 84.3 | 86.3 | 86.3 | 86.3 | 82.4 | 82.4 | 82.4 | 82.4 | 82.4 |
| 3. AT5G58010 | 80.4 | 82.4 | 82.4 | 82.4 | 78.4 | 78.4 | 78.4 | 78.4 | 78.4 |
| 4. TA12416 | 86.3 | 88.2 | 88.2 | 88.2 | 84.3 | 84.3 | 84.3 | 84.3 | 84.3 |
| 5. TA5414 | 86.3 | 88.2 | 88.2 | 88.2 | 84.3 | 84.3 | 84.3 | 84.3 | 84.3 |
| 6. TC205173 | 86.3 | 88.2 | 88.2 | 88.2 | 84.3 | 84.3 | 84.3 | 84.3 | 84.3 |
| 7. GSVIVT00017237001 | 86.3 | 88.2 | 88.2 | 88.2 | 84.3 | 84.3 | 84.3 | 84.3 | 84.3 |
| 8. TC7102 | 86.3 | 88.2 | 88.2 | 88.2 | 84.3 | 84.3 | 84.3 | 84.3 | 84.3 |
| 9. TA34455 | 86.3 | 88.2 | 88.2 | 88.2 | 84.3 | 84.3 | 84.3 | 84.3 | 84.3 |
| 10. TC7103 | 82.4 | 84.3 | 84.3 | 84.3 | 80.4 | 80.4 | 80.4 | 80.4 | 80.4 |
| 11. TA37666 | 82.4 | 84.3 | 84.3 | 84.3 | 80.4 | 80.4 | 80.4 | 80.4 | 80.4 |
| 12. TC67603 | 84.3 | 86.3 | 86.3 | 86.3 | 82.4 | 82.4 | 82.4 | 82.4 | 82.4 |
| 13. Os06g08500 | 74.5 | 76.5 | 76.5 | 76.5 | 72.5 | 72.5 | 72.5 | 72.5 | 72.5 |
| 14. Os02g55250 | 86.3 | 88.2 | 88.2 | 88.2 | 84.3 | 84.3 | 84.3 | 84.3 | 84.3 |
| 15. Os09g25040 | 77.8 | 79.6 | 79.6 | 79.6 | 75.9 | 75.9 | 75.9 | 75.9 | 75.9 |
| 16. TA2544 | 84.3 | 86.3 | 86.3 | 86.3 | 82.4 | 82.4 | 82.4 | 82.4 | 82.4 |
| 17. DV982110 | 86.3 | 90.2 | 88.2 | 88.2 | 84.3 | 84.3 | 84.3 | 84.3 | 84.3 |
| 18. WO051050seqID516 | 86.3 | 90.2 | 88.2 | 88.2 | 84.3 | 84.3 | 84.3 | 84.3 | 84.3 |
| 19. AT4G02590 | 94.1 | 90.2 | 88.2 | 88.2 | 88.2 | 88.2 | 88.2 | 88.2 | 88.2 |
| 20. TC10015_part | 94.1 | 90.2 | 88.2 | 88.2 | 88.2 | 88.2 | 88.2 | 88.2 | 88.2 |
| 21. AT1G03040 | 92.2 | 88.2 | 86.3 | 86.3 | 86.3 | 86.3 | 86.3 | 86.3 | 86.3 |
| 22. TA13791 | 96.1 | 94.1 | 92.2 | 92.2 | 92.2 | 92.2 | 92.2 | 92.2 | 92.2 |
| 23. TC60118 | 96.1 | 94.1 | 92.2 | 92.2 | 92.2 | 92.2 | 92.2 | 92.2 | 92.2 |
| 24. TC60119 | 94.1 | 90.2 | 88.2 | 88.2 | 90.2 | 90.2 | 90.2 | 90.2 | 90.2 |
| 25. TC61833 | 96.1 | 92.2 | 90.2 | 90.2 | 90.2 | 90.2 | 90.2 | 90.2 | 90.2 |
| 26. TA3392 | 96.1 | 94.1 | 92.2 | 92.2 | 92.2 | 92.2 | 92.2 | 92.2 | 92.2 |
| 27. WO051050seqID1671 | 92.2 | 90.2 | 88.2 | 88.2 | 88.2 | 88.2 | 88.2 | 88.2 | 88.2 |
| 28. Pt_TC63334 | 94.1 | 90.2 | 88.2 | 88.2 | 88.2 | 88.2 | 88.2 | 88.2 | 88.2 |
| 29. TA3263 | 96.1 | 92.2 | 90.2 | 90.2 | 90.2 | 90.2 | 90.2 | 90.2 | 90.2 |
| 30. Pt_scaff_II.416 | 94.1 | 92.2 | 90.2 | 90.2 | 90.2 | 90.2 | 90.2 | 90.2 | 90.2 |
| 31. TA2825 | 96.1 | 94.1 | 92.2 | 92.2 | 92.2 | 92.2 | 92.2 | 92.2 | 92.2 |
| 32. TC207545 | 96.1 | 94.1 | 92.2 | 92.2 | 92.2 | 92.2 | 92.2 | 92.2 | 92.2 |
| 33. TC229602 | 96.1 | 94.1 | 92.2 | 92.2 | 92.2 | 92.2 | 92.2 | 92.2 | 92.2 |
| 34. TA46156 | 96.1 | 94.1 | 92.2 | 92.2 | 92.2 | 92.2 | 92.2 | 92.2 | 92.2 |
| 35. AK247217 | 94.1 | 90.2 | 88.2 | 88.2 | 88.2 | 88.2 | 88.2 | 88.2 | 88.2 |
| 36. TA30646 | 96.1 | 92.2 | 90.2 | 90.2 | 90.2 | 90.2 | 90.2 | 90.2 | 90.2 |
| 37. TC8633 | | 90.2 | 88.2 | 88.2 | 88.2 | 88.2 | 88.2 | 88.2 | 88.2 |
| 38. TC15501 | 96.1 | | 92.2 | 92.2 | 92.2 | 92.2 | 92.2 | 92.2 | 92.2 |
| 39. TA1140 | 96.1 | 98.0 | | 100.0 | 92.2 | 92.2 | 92.2 | 92.2 | 92.2 |
| 40. TA3490_part | 96.1 | 98.0 | 100.0 | | 92.2 | 92.2 | 92.2 | 92.2 | 92.2 |
| 41. CK293938 | 96.1 | 98.0 | 100.0 | 100.0 | | 100.0 | 100.0 | 100.0 | 100.0 |
| 42. TC12771 | 96.1 | 98.0 | 100.0 | 100.0 | 100.0 | | 100.0 | 100.0 | 100.0 |
| 43. TC172581 | 96.1 | 98.0 | 100.0 | 100.0 | 100.0 | 100.0 | | 100.0 | 100.0 |
| 44. TA28621 | 96.1 | 98.0 | 100.0 | 100.0 | 100.0 | 100.0 | 100.0 | | 100.0 |
| 45. TA21665 | 96.1 | 98.0 | 100.0 | 100.0 | 100.0 | 100.0 | 100.0 | 100.0 | |
| 46. TA46194 | 96.1 | 100.0 | 98.0 | 98.0 | 98.0 | 98.0 | 98.0 | 98.0 | 98.0 |
| 47. DY268946 | 96.1 | 98.0 | 100.0 | 100.0 | 100.0 | 100.0 | 100.0 | 100.0 | 100.0 |
| 48. CO123623 | 96.1 | 98.0 | 100.0 | 100.0 | 100.0 | 100.0 | 100.0 | 100.0 | 100.0 |
| 49. Pt_scaff_70.65 | 90.2 | 94.1 | 96.1 | 96.1 | 98.0 | 98.0 | 98.0 | 98.0 | 98.0 |
| 50. Pt_scaff_XIII.403 | 90.2 | 94.1 | 96.1 | 96.1 | 98.0 | 98.0 | 98.0 | 98.0 | 98.0 |
| 51. TA1616 | 94.1 | 100.0 | 98.0 | 98.0 | 98.0 | 98.0 | 98.0 | 98.0 | 98.0 |
| 52. TA55042 | 98.0 | 98.0 | 98.0 | 98.0 | 98.0 | 98.0 | 98.0 | 98.0 | 98.0 |
| 53. WO051050seqID77 | 94.1 | 96.1 | 98.0 | 98.0 | 100.0 | 100.0 | 100.0 | 100.0 | 100.0 |
| 54. TC3698 | 98.0 | 98.0 | 96.1 | 96.1 | 96.1 | 96.1 | 96.1 | 96.1 | 96.1 |
| 55. Os03g58330 | 96.1 | 100.0 | 98.0 | 98.0 | 98.0 | 98.0 | 98.0 | 98.0 | 98.0 |
| 56. TA139285 | 96.1 | 100.0 | 98.0 | 98.0 | 98.0 | 98.0 | 98.0 | 98.0 | 98.0 |
| 57. TabHLH11 | 98.0 | 98.0 | 96.1 | 96.1 | 96.1 | 96.1 | 96.1 | 96.1 | 96.1 |
| 58. TC104646 | 96.1 | 100.0 | 98.0 | 98.0 | 98.0 | 98.0 | 98.0 | 98.0 | 98.0 |
| 59. TA126400 | 96.1 | 100.0 | 98.0 | 98.0 | 98.0 | 98.0 | 98.0 | 98.0 | 98.0 |
| 60. Os07g08440 | 96.1 | 100.0 | 98.0 | 98.0 | 98.0 | 98.0 | 98.0 | 98.0 | 98.0 |
| 61. Os02g35660 | 94.1 | 98.0 | 96.1 | 96.1 | 96.1 | 96.1 | 96.1 | 96.1 | 96.1 |
| 62. DT543504 | 92.2 | 96.1 | 94.1 | 94.1 | 94.1 | 94.1 | 94.1 | 94.1 | 94.1 |
| 63. Pt_scaff28.86 | 92.2 | 96.1 | 94.1 | 94.1 | 94.1 | 94.1 | 94.1 | 94.1 | 94.1 |
| 64. GSVIVT00016367001 | 94.1 | 98.0 | 96.1 | 96.1 | 96.1 | 96.1 | 96.1 | 96.1 | 96.1 |
| 65. TC19278 | 66.7 | 70.6 | 68.6 | 68.6 | 68.6 | 68.6 | 68.6 | 68.6 | 68.6 |
| 66. TA14134 | 92.2 | 96.1 | 94.1 | 94.1 | 94.1 | 94.1 | 94.1 | 94.1 | 94.1 |
| 67. TC68930 | 96.1 | 100.0 | 98.0 | 98.0 | 98.0 | 98.0 | 98.0 | 98.0 | 98.0 |
| 68. TC140470 | 92.2 | 96.1 | 94.1 | 94.1 | 94.1 | 94.1 | 94.1 | 94.1 | 94.1 |
| 69. TC253044 | 92.2 | 96.1 | 94.1 | 94.1 | 94.1 | 94.1 | 94.1 | 94.1 | 94.1 |
| 70. Os06g09370 | 90.2 | 94.1 | 92.2 | 92.2 | 92.2 | 92.2 | 92.2 | 92.2 | 92.2 |
| | 46 | 47 | 48 | 49 | 50 | 51 | 52 | 53 | 54 |
| 1. AT2G24260 | 88.2 | 84.3 | 88.2 | 82.4 | 80.4 | 86.3 | 88.2 | 86.3 | 82.4 |
| 2. AT4G30980 | 86.3 | 82.4 | 86.3 | 80.4 | 78.4 | 84.3 | 86.3 | 84.3 | 80.4 |
| 3. AT5G58010 | 82.4 | 78.4 | 82.4 | 76.5 | 74.5 | 80.4 | 82.4 | 80.4 | 82.4 |
| 4. TA12416 | 88.2 | 84.3 | 88.2 | 82.4 | 80.4 | 88.2 | 88.2 | 86.3 | 82.4 |
| 5. TA5414 | 88.2 | 84.3 | 88.2 | 82.4 | 80.4 | 88.2 | 88.2 | 86.3 | 82.4 |
| 6. TC205173 | 88.2 | 84.3 | 88.2 | 82.4 | 80.4 | 88.2 | 88.2 | 86.3 | 82.4 |
| 7. GSVIVT00017237001 | 88.2 | 84.3 | 88.2 | 82.4 | 80.4 | 88.2 | 88.2 | 86.3 | 82.4 |
| 8. TC7102 | 88.2 | 84.3 | 88.2 | 82.4 | 80.4 | 88.2 | 88.2 | 86.3 | 82.4 |
| 9. TA34455 | 88.2 | 84.3 | 88.2 | 82.4 | 80.4 | 88.2 | 88.2 | 86.3 | 82.4 |
| 10. TC7103 | 84.3 | 80.4 | 84.3 | 78.4 | 76.5 | 84.3 | 84.3 | 82.4 | 78.4 |
| 11. TA37666 | 84.3 | 80.4 | 84.3 | 78.4 | 76.5 | 84.3 | 84.3 | 82.4 | 78.4 |
| 12. TC67603 | 86.3 | 82.4 | 86.3 | 84.3 | 82.4 | 86.3 | 86.3 | 84.3 | 80.4 |
| 13. Os06g08500 | 76.5 | 72.5 | 76.5 | 70.6 | 68.6 | 76.5 | 76.5 | 74.5 | 70.6 |
| 14. Os02g55250 | 88.2 | 84.3 | 88.2 | 82.4 | 80.4 | 88.2 | 88.2 | 86.3 | 82.4 |
| 15. Os09g25040 | 79.6 | 75.9 | 79.6 | 74.1 | 72.2 | 79.6 | 79.6 | 77.8 | 74.1 |
| 16. TA2544 | 86.3 | 82.4 | 86.3 | 80.4 | 78.4 | 86.3 | 86.3 | 84.3 | 80.4 |
| 17. DV982110 | 90.2 | 84.3 | 88.2 | 82.4 | 80.4 | 86.3 | 88.2 | 86.3 | 82.4 |
| 18. WO051050seqID516 | 90.2 | 84.3 | 88.2 | 82.4 | 80.4 | 86.3 | 88.2 | 86.3 | 82.4 |
| 19. AT4G02590 | 90.2 | 90.2 | 90.2 | 88.2 | 86.3 | 94.1 | 90.2 | 88.2 | 90.2 |
| 20. TC10015_part | 90.2 | 90.2 | 90.2 | 88.2 | 86.3 | 94.1 | 90.2 | 88.2 | 90.2 |
| 21. AT1G03040 | 88.2 | 88.2 | 88.2 | 86.3 | 84.3 | 92.2 | 88.2 | 86.3 | 88.2 |
| 22. TA13791 | 94.1 | 94.1 | 94.1 | 88.2 | 86.3 | 90.2 | 94.1 | 92.2 | 94.1 |
| 23. TC60118 | 94.1 | 94.1 | 94.1 | 88.2 | 86.3 | 90.2 | 94.1 | 92.2 | 94.1 |
| 24. TC60119 | 90.2 | 90.2 | 90.2 | 88.2 | 86.3 | 86.3 | 90.2 | 90.2 | 94.1 |
| 25. TC61833 | 92.2 | 92.2 | 92.2 | 86.3 | 84.3 | 88.2 | 92.2 | 90.2 | 96.1 |
| 26. TA3392 | 94.1 | 94.1 | 94.1 | 88.2 | 86.3 | 90.2 | 94.1 | 92.2 | 94.1 |
| 27. WO051050seqID1671 | 90.2 | 90.2 | 90.2 | 84.3 | 82.4 | 86.3 | 90.2 | 88.2 | 90.2 |
| 28. Pt_TC63334 | 90.2 | 90.2 | 90.2 | 84.3 | 82.4 | 86.3 | 90.2 | 88.2 | 92.2 |
| 29. TA3263 | 92.2 | 92.2 | 92.2 | 86.3 | 84.3 | 88.2 | 92.2 | 90.2 | 94.1 |
| 30. Pt_scaff_II.416 | 92.2 | 92.2 | 92.2 | 86.3 | 84.3 | 88.2 | 92.2 | 90.2 | 92.2 |
| 31. TA2825 | 94.1 | 94.1 | 94.1 | 88.2 | 86.3 | 90.2 | 94.1 | 92.2 | 94.1 |
| 32. TC207545 | 94.1 | 94.1 | 94.1 | 88.2 | 86.3 | 90.2 | 94.1 | 92.2 | 94.1 |
| 33. TC229602 | 94.1 | 94.1 | 94.1 | 88.2 | 86.3 | 90.2 | 94.1 | 92.2 | 94.1 |
| 34. TA46156 | 94.1 | 94.1 | 94.1 | 88.2 | 86.3 | 90.2 | 94.1 | 92.2 | 94.1 |
| 35. AK247217 | 90.2 | 90.2 | 90.2 | 84.3 | 82.4 | 86.3 | 90.2 | 88.2 | 94.1 |
| 36. TA30646 | 92.2 | 92.2 | 92.2 | 86.3 | 84.3 | 88.2 | 92.2 | 90.2 | 96.1 |
| 37. TC8633 | 90.2 | 90.2 | 90.2 | 86.3 | 84.3 | 88.2 | 90.2 | 88.2 | 92.2 |
| 38. TC15501 | 100.0 | 94.1 | 98.0 | 90.2 | 88.2 | 94.1 | 98.0 | 96.1 | 90.2 |
| 39. TA1140 | 92.2 | 94.1 | 94.1 | 86.3 | 84.3 | 88.2 | 92.2 | 92.2 | 88.2 |
| 40. TA3490_part | 92.2 | 94.1 | 94.1 | 86.3 | 84.3 | 88.2 | 92.2 | 92.2 | 88.2 |
| 41. CK293938 | 92.2 | 90.2 | 94.1 | 90.2 | 88.2 | 88.2 | 92.2 | 94.1 | 88.2 |
| 42. TC12771 | 92.2 | 90.2 | 94.1 | 90.2 | 88.2 | 88.2 | 92.2 | 94.1 | 88.2 |
| 43. TC172581 | 92.2 | 90.2 | 94.1 | 90.2 | 88.2 | 88.2 | 92.2 | 94.1 | 88.2 |
| 44. TA28621 | 92.2 | 90.2 | 94.1 | 90.2 | 88.2 | 88.2 | 92.2 | 94.1 | 88.2 |
| 45. TA21665 | 92.2 | 90.2 | 94.1 | 90.2 | 88.2 | 88.2 | 92.2 | 94.1 | 88.2 |
| 46. TA46194 | | 94.1 | 98.0 | 90.2 | 88.2 | 94.1 | 98.0 | 96.1 | 90.2 |
| 47. DY268946 | 98.0 | | 96.1 | 88.2 | 86.3 | 90.2 | 94.1 | 94.1 | 90.2 |
| 48. CO123623 | 98.0 | 100.0 | | 92.2 | 90.2 | 94.1 | 98.0 | 98.0 | 90.2 |
| 49. Pt_scaff_70.65 | 94.1 | 96.1 | 96.1 | | 98.0 | 90.2 | 90.2 | 92.2 | 84.3 |
| 50. Pt_scaff_XIII.403 | 94.1 | 96.1 | 96.1 | 100.0 | | 88.2 | 88.2 | 90.2 | 82.4 |
| 51. TA1616 | 100.0 | 98.0 | 98.0 | 94.1 | 94.1 | | 94.1 | 92.2 | 86.3 |
| 52. TA55042 | 98.0 | 98.0 | 98.0 | 94.1 | 94.1 | 98.0 | | 96.1 | 90.2 |
| 53. WO051050seqID77 | 96.1 | 98.0 | 98.0 | 96.1 | 96.1 | 96.1 | 96.1 | | 88.2 |
| 54. TC3698 | 98.0 | 96.1 | 96.1 | 92.2 | 92.2 | 96.1 | 96.1 | 94.1 | |
| 55. Os03g58330 | 100.0 | 98.0 | 98.0 | 92.2 | 92.2 | 96.1 | 98.0 | 96.1 | 98.0 |
| 56. TA139285 | 100.0 | 98.0 | 98.0 | 92.2 | 92.2 | 96.1 | 98.0 | 96.1 | 98.0 |
| 57. TabHLH11 | 98.0 | 96.1 | 96.1 | 90.2 | 90.2 | 94.1 | 96.1 | 94.1 | 100.0 |
| 58. TC104646 | 100.0 | 98.0 | 98.0 | 92.2 | 92.2 | 96.1 | 98.0 | 96.1 | 98.0 |
| 59. TA126400 | 100.0 | 98.0 | 98.0 | 92.2 | 92.2 | 96.1 | 98.0 | 96.1 | 98.0 |
| 60. Os07g08440 | 100.0 | 98.0 | 98.0 | 92.2 | 92.2 | 96.1 | 98.0 | 96.1 | 98.0 |
| 61. Os02g35660 | 98.0 | 96.1 | 96.1 | 92.2 | 92.2 | 96.1 | 96.1 | 96.1 | 96.1 |
| 62. DT543504 | 96.1 | 94.1 | 94.1 | 88.2 | 88.2 | 94.1 | 94.1 | 92.2 | 94.1 |
| 63. Pt_scaff28.86 | 96.1 | 94.1 | 94.1 | 88.2 | 88.2 | 94.1 | 94.1 | 92.2 | 94.1 |
| 64. GSVIVT00016367001 | 98.0 | 96.1 | 96.1 | 90.2 | 90.2 | 96.1 | 96.1 | 94.1 | 96.1 |
| 65. TC19278 | 70.6 | 68.6 | 68.6 | 66.7 | 66.7 | 68.6 | 68.6 | 68.6 | 68.6 |
| 66. TA14134 | 96.1 | 92.2 | 94.1 | 88.2 | 88.2 | 94.1 | 94.1 | 92.2 | 92.2 |
| 67. TC68930 | 100.0 | 98.0 | 98.0 | 92.2 | 92.2 | 98.0 | 98.0 | 96.1 | 98.0 |
| 68. TC140470 | 96.1 | 94.1 | 94.1 | 90.2 | 90.2 | 94.1 | 94.1 | 94.1 | 94.1 |
| 69. TC253044 | 96.1 | 94.1 | 94.1 | 90.2 | 90.2 | 94.1 | 94.1 | 94.1 | 94.1 |
| 70. Os06g09370 | 94.1 | 92.2 | 92.2 | 88.2 | 88.2 | 92.2 | 92.2 | 92.2 | 92.2 |
| | 55 | 56 | 57 | 58 | 59 | 60 | 61 | 62 | 63 |
| 1. AT2G24260 | 88.2 | 88.2 | 88.2 | 88.2 | 88.2 | 86.3 | 88.2 | 90.2 | 90.2 |
| 2. AT4G30980 | 86.3 | 86.3 | 86.3 | 86.3 | 86.3 | 84.3 | 88.2 | 90.2 | 90.2 |
| 3. AT5G58010 | 84.3 | 84.3 | 84.3 | 84.3 | 84.3 | 82.4 | 84.3 | 88.2 | 90.2 |
| 4. TA12416 | 88.2 | 88.2 | 88.2 | 88.2 | 88.2 | 86.3 | 88.2 | 90.2 | 90.2 |
| 5. TA5414 | 88.2 | 88.2 | 88.2 | 88.2 | 88.2 | 86.3 | 88.2 | 90.2 | 90.2 |
| 6. TC205173 | 88.2 | 88.2 | 88.2 | 88.2 | 88.2 | 86.3 | 88.2 | 90.2 | 90.2 |
| 7. GSVIVT00017237001 | 88.2 | 88.2 | 88.2 | 88.2 | 88.2 | 86.3 | 88.2 | 90.2 | 90.2 |
| 8. TC7102 | 88.2 | 88.2 | 88.2 | 88.2 | 88.2 | 86.3 | 88.2 | 90.2 | 90.2 |
| 9. TA34455 | 88.2 | 88.2 | 88.2 | 88.2 | 88.2 | 86.3 | 88.2 | 90.2 | 90.2 |
| 10. TC7103 | 84.3 | 84.3 | 84.3 | 84.3 | 84.3 | 82.4 | 86.3 | 88.2 | 88.2 |
| 11. TA37666 | 84.3 | 84.3 | 84.3 | 84.3 | 84.3 | 82.4 | 86.3 | 88.2 | 88.2 |
| 12. TC67603 | 86.3 | 86.3 | 86.3 | 86.3 | 86.3 | 84.3 | 86.3 | 88.2 | 88.2 |
| 13. Os06g08500 | 76.5 | 76.5 | 76.5 | 76.5 | 76.5 | 74.5 | 78.4 | 80.4 | 80.4 |
| 14. Os02g55250 | 88.2 | 88.2 | 88.2 | 88.2 | 88.2 | 86.3 | 88.2 | 90.2 | 90.2 |
| 15. Os09g25040 | 79.6 | 79.6 | 79.6 | 79.6 | 79.6 | 77.8 | 79.6 | 81.5 | 81.5 |
| 16. TA2544 | 86.3 | 86.3 | 86.3 | 86.3 | 86.3 | 84.3 | 86.3 | 88.2 | 88.2 |
| 17. DV982110 | 88.2 | 88.2 | 88.2 | 88.2 | 88.2 | 86.3 | 90.2 | 92.2 | 92.2 |
| 18. WO051050seqID516 | 88.2 | 88.2 | 88.2 | 88.2 | 88.2 | 86.3 | 90.2 | 92.2 | 92.2 |
| 19. AT4G02590 | 90.2 | 90.2 | 88.2 | 90.2 | 90.2 | 88.2 | 72.5 | 74.5 | 74.5 |
| 20. TC10015_part | 90.2 | 90.2 | 88.2 | 90.2 | 90.2 | 88.2 | 72.5 | 74.5 | 74.5 |
| 21. AT1G03040 | 88.2 | 88.2 | 86.3 | 88.2 | 88.2 | 86.3 | 72.5 | 74.5 | 74.5 |
| 22. TA13791 | 92.2 | 92.2 | 90.2 | 92.2 | 92.2 | 90.2 | 74.5 | 76.5 | 76.5 |
| 23. TC60118 | 92.2 | 92.2 | 90.2 | 92.2 | 92.2 | 90.2 | 74.5 | 76.5 | 76.5 |
| 24. TC60119 | 88.2 | 88.2 | 90.2 | 88.2 | 88.2 | 86.3 | 74.5 | 74.5 | 74.5 |
| 25. TC61833 | 90.2 | 90.2 | 92.2 | 90.2 | 90.2 | 88.2 | 74.5 | 76.5 | 76.5 |
| 26. TA3392 | 92.2 | 92.2 | 90.2 | 92.2 | 92.2 | 90.2 | 74.5 | 76.5 | 76.5 |
| 27. WO051050seqID1671 | 88.2 | 88.2 | 86.3 | 88.2 | 88.2 | 90.2 | 72.5 | 74.5 | 74.5 |
| 28. Pt_TC63334 | 88.2 | 88.2 | 88.2 | 88.2 | 88.2 | 86.3 | 72.5 | 74.5 | 74.5 |
| 29. TA3263 | 90.2 | 90.2 | 90.2 | 90.2 | 90.2 | 88.2 | 74.5 | 76.5 | 76.5 |
| 30. Pt_scaff_II.416 | 90.2 | 90.2 | 88.2 | 90.2 | 90.2 | 88.2 | 72.5 | 74.5 | 74.5 |
| 31. TA2825 | 92.2 | 92.2 | 90.2 | 92.2 | 92.2 | 90.2 | 74.5 | 76.5 | 76.5 |
| 32. TC207545 | 92.2 | 92.2 | 90.2 | 92.2 | 92.2 | 90.2 | 74.5 | 76.5 | 76.5 |
| 33. TC229602 | 92.2 | 92.2 | 90.2 | 92.2 | 92.2 | 90.2 | 74.5 | 76.5 | 76.5 |
| 34. TA46156 | 92.2 | 92.2 | 90.2 | 92.2 | 92.2 | 90.2 | 74.5 | 76.5 | 76.5 |
| 35. AK247217 | 88.2 | 88.2 | 90.2 | 88.2 | 88.2 | 86.3 | 72.5 | 74.5 | 74.5 |
| 36. TA30646 | 90.2 | 90.2 | 92.2 | 90.2 | 90.2 | 88.2 | 74.5 | 76.5 | 76.5 |
| 37. TC8633 | 92.2 | 92.2 | 92.2 | 92.2 | 92.2 | 90.2 | 76.5 | 78.4 | 78.4 |
| 38. TC15501 | 92.2 | 92.2 | 90.2 | 92.2 | 92.2 | 90.2 | 80.4 | 82.4 | 82.4 |
| 39. TA1140 | 94.1 | 94.1 | 92.2 | 94.1 | 94.1 | 92.2 | 78.4 | 80.4 | 80.4 |
| 40. TA3490_part | 94.1 | 94.1 | 92.2 | 94.1 | 94.1 | 92.2 | 78.4 | 80.4 | 80.4 |
| 41. CK293938 | 90.2 | 90.2 | 88.2 | 90.2 | 90.2 | 88.2 | 78.4 | 76.5 | 76.5 |
| 42. TC12771 | 90.2 | 90.2 | 88.2 | 90.2 | 90.2 | 88.2 | 78.4 | 76.5 | 76.5 |
| 43. TC172581 | 90.2 | 90.2 | 88.2 | 90.2 | 90.2 | 88.2 | 78.4 | 76.5 | 76.5 |
| 44. TA28621 | 90.2 | 90.2 | 88.2 | 90.2 | 90.2 | 88.2 | 78.4 | 76.5 | 76.5 |
| 45. TA21665 | 90.2 | 90.2 | 88.2 | 90.2 | 90.2 | 88.2 | 78.4 | 76.5 | 76.5 |
| 46. TA46194 | 92.2 | 92.2 | 90.2 | 92.2 | 92.2 | 90.2 | 80.4 | 82.4 | 82.4 |
| 47. DY268946 | 92.2 | 92.2 | 90.2 | 92.2 | 92.2 | 90.2 | 78.4 | 76.5 | 76.5 |
| 48. CO123623 | 92.2 | 92.2 | 90.2 | 92.2 | 92.2 | 90.2 | 78.4 | 80.4 | 80.4 |
| 49. Pt_scaff_70.65 | 86.3 | 86.3 | 84.3 | 86.3 | 86.3 | 84.3 | 74.5 | 74.5 | 74.5 |
| 50. Pt_scaff_XIII.403 | 84.3 | 84.3 | 82.4 | 84.3 | 84.3 | 82.4 | 72.5 | 72.5 | 72.5 |
| 51. TA1616 | 90.2 | 90.2 | 88.2 | 90.2 | 90.2 | 88.2 | 76.5 | 78.4 | 78.4 |
| 52. TA55042 | 92.2 | 92.2 | 90.2 | 92.2 | 92.2 | 90.2 | 78.4 | 80.4 | 80.4 |
| 53. WO051050seqID77 | 90.2 | 90.2 | 88.2 | 90.2 | 90.2 | 88.2 | 78.4 | 78.4 | 78.4 |
| 54. TC3698 | 90.2 | 90.2 | 92.2 | 90.2 | 90.2 | 88.2 | 72.5 | 76.5 | 78.4 |
| 55. Os03g58330 | | 100.0 | 98.0 | 100.0 | 100.0 | 98.0 | 78.4 | 80.4 | 80.4 |
| 56. TA139285 | 100.0 | | 98.0 | 100.0 | 100.0 | 98.0 | 78.4 | 80.4 | 80.4 |
| 57. TabHLH11 | 98.0 | 98.0 | | 98.0 | 98.0 | 96.1 | 78.4 | 80.4 | 80.4 |
| 58. TC104646 | 100.0 | 100.0 | 98.0 | | 100.0 | 98.0 | 78.4 | 80.4 | 80.4 |
| 59. TA126400 | 100.0 | 100.0 | 98.0 | 100.0 | | 98.0 | 78.4 | 80.4 | 80.4 |
| 60. Os07g08440 | 100.0 | 100.0 | 98.0 | 100.0 | 100.0 | | 76.5 | 78.4 | 78.4 |
| 61. Os02g35660 | 98.0 | 98.0 | 96.1 | 98.0 | 98.0 | 98.0 | | 88.2 | 88.2 |
| 62. DT543504 | 96.1 | 96.1 | 94.1 | 96.1 | 96.1 | 96.1 | 98.0 | | 94.1 |
| 63. Pt_scaff28.86 | 96.1 | 96.1 | 94.1 | 96.1 | 96.1 | 96.1 | 98.0 | 96.1 | |
| 64. GSVIVT00016367001 | 98.0 | 98.0 | 96.1 | 98.0 | 98.0 | 98.0 | 100.0 | 98.0 | 98.0 |
| 65. TC19278 | 70.6 | 70.6 | 68.6 | 70.6 | 70.6 | 70.6 | 72.5 | 70.6 | 70.6 |
| 66. TA14134 | 94.1 | 94.1 | 92.2 | 94.1 | 94.1 | 94.1 | 92.2 | 94.1 | 94.1 |
| 67. TC68930 | 100.0 | 100.0 | 98.0 | 100.0 | 100.0 | 100.0 | 98.0 | 98.0 | 98.0 |
| 68. TC140470 | 96.1 | 96.1 | 94.1 | 96.1 | 96.1 | 96.1 | 98.0 | 96.1 | 98.0 |
| 69. TC253044 | 96.1 | 96.1 | 94.1 | 96.1 | 96.1 | 96.1 | 98.0 | 96.1 | 98.0 |
| 70. Os06g09370 | 94.1 | 94.1 | 92.2 | 94.1 | 94.1 | 94.1 | 96.1 | 94.1 | 96.1 |

| | 64 | 65 | 66 | 67 | 68 | 69 | 70 |
|---|---|---|---|---|---|---|---|
| 1. AT2G24260 | 92.2 | 64.7 | 88.2 | 94.1 | 86.3 | 86.3 | 88.2 |
| 2. AT4G30980 | 92.2 | 64.7 | 90.2 | 96.1 | 86.3 | 86.3 | 88.2 |
| 3. AT5G58010 | 92.2 | 68.6 | 86.3 | 96.1 | 82.4 | 82.4 | 84.3 |
| 4. TA12416 | 92.2 | 64.7 | 90.2 | 94.1 | 86.3 | 86.3 | 88.2 |
| 5. TA5414 | 92.2 | 64.7 | 90.2 | 94.1 | 86.3 | 86.3 | 88.2 |
| 6. TC205173 | 92.2 | 64.7 | 90.2 | 94.1 | 86.3 | 86.3 | 88.2 |
| 7. GSVIVT00017237001 | 92.2 | 64.7 | 90.2 | 94.1 | 86.3 | 86.3 | 88.2 |
| 8. TC7102 | 92.2 | 64.7 | 90.2 | 94.1 | 86.3 | 86.3 | 88.2 |
| 9. TA34455 | 92.2 | 64.7 | 90.2 | 94.1 | 86.3 | 86.3 | 88.2 |
| 10. TC7103 | 90.2 | 66.7 | 90.2 | 94.1 | 84.3 | 84.3 | 86.3 |
| 11. TA37666 | 90.2 | 66.7 | 90.2 | 94.1 | 84.3 | 84.3 | 86.3 |
| 12. TC67603 | 90.2 | 64.7 | 88.2 | 92.2 | 84.3 | 84.3 | 86.3 |
| 13. Os06g08500 | 82.4 | 64.7 | 82.4 | 86.3 | 76.5 | 76.5 | 78.4 |
| 14. Os02g55250 | 92.2 | 64.7 | 90.2 | 94.1 | 86.3 | 86.3 | 88.2 |
| 15. Os09g25040 | 83.3 | 57.4 | 81.5 | 85.2 | 77.8 | 77.8 | 79.6 |
| 16. TA2544 | 90.2 | 62.7 | 88.2 | 92.2 | 84.3 | 84.3 | 86.3 |
| 17. DV982110 | 94.1 | 66.7 | 88.2 | 96.1 | 88.2 | 88.2 | 90.2 |
| 18. WO051050seqID516 | 94.1 | 66.7 | 88.2 | 96.1 | 88.2 | 88.2 | 90.2 |
| 19. AT4G02590 | 76.5 | 49.0 | 74.5 | 78.4 | 70.6 | 70.6 | 72.5 |
| 20. TC10015_part | 76.5 | 49.0 | 74.5 | 78.4 | 70.6 | 70.6 | 72.5 |
| 21. AT1G03040 | 76.5 | 49.0 | 76.5 | 80.4 | 70.6 | 70.6 | 72.5 |
| 22. TA13791 | 78.4 | 51.0 | 76.5 | 80.4 | 72.5 | 72.5 | 74.5 |
| 23. TC60118 | 78.4 | 51.0 | 76.5 | 80.4 | 72.5 | 72.5 | 74.5 |
| 24. TC60119 | 76.5 | 51.0 | 74.5 | 78.4 | 72.5 | 72.5 | 74.5 |
| 25. TC61833 | 78.4 | 51.0 | 76.5 | 80.4 | 72.5 | 72.5 | 74.5 |
| 26. TA3392 | 78.4 | 51.0 | 76.5 | 80.4 | 72.5 | 72.5 | 74.5 |
| 27. WO051050seqID1671 | 76.5 | 49.0 | 74.5 | 78.4 | 74.5 | 74.5 | 74.5 |
| 28. Pt_TC63334 | 76.5 | 49.0 | 74.5 | 78.4 | 70.6 | 70.6 | 72.5 |
| 29. TA3263 | 78.4 | 51.0 | 76.5 | 80.4 | 72.5 | 72.5 | 74.5 |
| 30. Pt_scaff_II.416 | 76.5 | 49.0 | 74.5 | 78.4 | 70.6 | 70.6 | 72.5 |
| 31. TA2825 | 78.4 | 51.0 | 76.5 | 80.4 | 72.5 | 72.5 | 74.5 |
| 32. TC207545 | 78.4 | 51.0 | 76.5 | 80.4 | 72.5 | 72.5 | 74.5 |
| 33. TC229602 | 78.4 | 51.0 | 76.5 | 80.4 | 72.5 | 72.5 | 74.5 |
| 34. TA46156 | 78.4 | 51.0 | 76.5 | 80.4 | 72.5 | 72.5 | 74.5 |
| 35. AK247217 | 76.5 | 49.0 | 74.5 | 78.4 | 70.6 | 70.6 | 72.5 |
| 36. TA30646 | 78.4 | 51.0 | 76.5 | 80.4 | 72.5 | 72.5 | 74.5 |
| 37. TC8633 | 80.4 | 52.9 | 78.4 | 82.4 | 74.5 | 74.5 | 76.5 |
| 38. TC15501 | 84.3 | 56.9 | 78.4 | 86.3 | 78.4 | 78.4 | 80.4 |
| 39. TA1140 | 82.4 | 54.9 | 78.4 | 84.3 | 76.5 | 76.5 | 78.4 |
| 40. TA3490_part | 82.4 | 54.9 | 78.4 | 84.3 | 76.5 | 76.5 | 78.4 |
| 41. CK293938 | 78.4 | 52.9 | 76.5 | 80.4 | 76.5 | 76.5 | 78.4 |
| 42. TC12771 | 78.4 | 52.9 | 76.5 | 80.4 | 76.5 | 76.5 | 78.4 |
| 43. TC172581 | 78.4 | 52.9 | 76.5 | 80.4 | 76.5 | 76.5 | 78.4 |
| 44. TA28621 | 78.4 | 52.9 | 76.5 | 80.4 | 76.5 | 76.5 | 78.4 |
| 45. TA21665 | 78.4 | 52.9 | 76.5 | 80.4 | 76.5 | 76.5 | 78.4 |
| 46. TA46194 | 84.3 | 56.9 | 78.4 | 86.3 | 78.4 | 78.4 | 80.4 |
| 47. DY268946 | 78.4 | 52.9 | 76.5 | 80.4 | 72.5 | 72.5 | 74.5 |
| 48. CO123623 | 82.4 | 54.9 | 78.4 | 84.3 | 76.5 | 76.5 | 78.4 |
| 49. Pt_scaff_70.65 | 76.5 | 52.9 | 74.5 | 78.4 | 72.5 | 72.5 | 74.5 |
| 50. Pt_scaff_XIII.403 | 74.5 | 51.0 | 72.5 | 76.5 | 70.6 | 70.6 | 72.5 |
| 51. TA1616 | 80.4 | 52.9 | 78.4 | 82.4 | 74.5 | 74.5 | 76.5 |
| 52. TA55042 | 82.4 | 54.9 | 78.4 | 84.3 | 76.5 | 76.5 | 78.4 |
| 53. WO051050seqID77 | 80.4 | 54.9 | 76.5 | 82.4 | 76.5 | 76.5 | 78.4 |
| 54. TC3698 | 80.4 | 52.9 | 74.5 | 82.4 | 70.6 | 70.6 | 72.5 |
| 55. Os03g58330 | 82.4 | 54.9 | 78.4 | 84.3 | 76.5 | 76.5 | 78.4 |
| 56. TA139285 | 82.4 | 54.9 | 78.4 | 84.3 | 76.5 | 76.5 | 78.4 |
| 57. TabHLH11 | 82.4 | 54.9 | 78.4 | 84.3 | 76.5 | 76.5 | 78.4 |
| 58. TC104646 | 82.4 | 54.9 | 78.4 | 84.3 | 76.5 | 76.5 | 78.4 |
| 59. TA126400 | 82.4 | 54.9 | 78.4 | 84.3 | 76.5 | 76.5 | 78.4 |
| 60. Os07g08440 | 80.4 | 52.9 | 76.5 | 82.4 | 78.4 | 78.4 | 78.4 |
| 61. Os02g35660 | 90.2 | 64.7 | 82.4 | 88.2 | 88.2 | 88.2 | 90.2 |
| 62. DT543504 | 96.1 | 66.7 | 82.4 | 92.2 | 88.2 | 88.2 | 90.2 |
| 63. Pt_scaff28.86 | 98.0 | 68.6 | 82.4 | 94.1 | 90.2 | 90.2 | 92.2 |
| 64. GSVIVT00016367001 | | 70.6 | 84.3 | 96.1 | 90.2 | 90.2 | 92.2 |
| 65. TC19278 | 72.5 | | 62.7 | 68.6 | 62.7 | 62.7 | 64.7 |
| 66. TA14134 | 96.1 | 72.5 | | 88.2 | 78.4 | 78.4 | 80.4 |
| 67. TC68930 | 100.0 | 72.5 | 96.1 | | 86.3 | 86.3 | 88.2 |
| 68. TC140470 | 98.0 | 70.6 | 94.1 | 98.0 | | 100.0 | 96.1 |
| 69. TC253044 | 98.0 | 70.6 | 94.1 | 98.0 | 100.0 | | 96.1 |
| 70. Os06g09370 | 96.1 | 68.6 | 92.2 | 96.1 | 98.0 | 98.0 | |

### Example 46

### Identification of Domains Comprised in Polypeptide Sequences Useful in Performing the Methods of the Invention

[1282] The Integrated Resource of Protein Families, Domains and Sites (InterPro) database is an integrated interface for the commonly used signature databases for text- and sequence-based searches. The InterPro database combines these databases, which use different methodologies and varying degrees of biological information about well-characterized proteins to derive protein signatures. Collaborating databases include SWISS-PROT, PROSITE, TrEMBL, PRINTS, ProDom and Pfam, Smart and TIGRFAMs. Pfam is a large collection of multiple sequence alignments and hidden Markov models covering many common protein domains and families. Pfam is hosted at the Sanger Institute server in the United Kingdom. Interpro is hosted at the European Bioinformatics Institute in the United Kingdom.

[1283] The results of the InterPro scan of the polypeptide sequence as represented by SEQ ID NO: 245 are presented in Table E4.

TABLE E4
InterPro scan results (major accession numbers) of the polypeptide sequence as
represented by SEQ ID NO: 245.

| | | | Amino acid coordinates |
|---|---|---|---|
| | Accession | | on SEQ ID NO 245; |
| Database | number | Accession name | e-value |
| InterPro | IPR001092 | Basic helix-loop-helix dimerisation | |
| | | region bHLH | |
| HMMPfam | PF00010.14 | Helix-loop-helix DNA-binding domain | T[127-176] 1.6e−06 |
| HMMSmart | SM00353 | no description | T[132-181] 1.5e−09 |
| ProfileScan | PS50888 | HLH | T[120-176] 12.451 |
| InterPro | IPR011598 | Helix-loop-helix DNA-binding | |
| superfamily | SSF47459 | Helix-loop-helix DNA-binding domain | T[122-195] 1.8e−14 |

### Example 47

### Topology Prediction of the Polypeptide Sequences Useful in Performing the Methods of the Invention

[1284] TargetP 1.1 predicts the subcellular location of eukaryotic proteins. The location assignment is based on the predicted presence of any of the N-terminal pre-sequences: chloroplast transit peptide (cTP), mitochondrial targeting peptide (mTP) or secretory pathway signal peptide (SP). Scores on which the final prediction is based are not really probabilities, and they do not necessarily add to one. However, the location with the highest score is the most likely according to TargetP, and the relationship between the scores (the reliability class) may be an indication of how certain the prediction is. The reliability class (RC) ranges from 1 to 5, where 1 indicates the strongest prediction. TargetP is maintained at the server of the Technical University of Denmark.

[1285] For the sequences predicted to contain an N-terminal presequence a potential cleavage site can also be predicted.

[1286] A number of parameters were selected, such as organism group (non-plant or plant), cutoff sets (none, predefined set of cutoffs, or user-specified set of cutoffs), and the calculation of prediction of cleavage sites (yes or no).

[1287] The results of TargetP 1.1 analysis of the polypeptide sequence as represented by SEQ ID NO: 245 are presented Table E5. The “plant” organism group has been selected, no cutoffs defined, and the predicted length of the transit peptide requested. The subcellular localization of the polypeptide sequence as represented by SEQ ID NO: 245 may be the cytoplasm or nucleus, no transit peptide is predicted.

TABLE E5
TargetP 1.1 analysis of the polypeptide sequence
as represented by SEQ ID NO: 245

| | |
|---|---|
| Length (AA) | 281 |
| Chloroplastic transit peptide | 0.094 |
| Mitochondrial transit peptide | 0.166 |
| Secretory pathway signal peptide | 0.034 |
| Other subcellular targeting | 0.855 |
| Predicted Location | / |
| Reliability class | 2 |
| Predicted transit peptide length | / |

[1288] When analysed with PLOC (Park and Kanehisa, Bioinformatics, 19, 1656-1663, 2003) or with PSORT (URL: psort.org), the protein is predicted to have a nuclear localisation.

[1289] Many other algorithms can be used to perform such analyses, including:
[1290] ChloroP 1.1 hosted on the server of the Technical University of Denmark;
[1291] Protein Prowler Subcellular Localisation Predictor version 1.2 hosted on the server of the Institute for Molecular Bioscience, University of Queensland, Brisbane, Australia;
[1292] PENCE Proteome Analyst PA-GOSUB 2.5 hosted on the server of the University of Alberta, Edmonton, Alberta, Canada;
[1293] TMHMM, hosted on the server of the Technical University of Denmark;

### Example 48

### Functional Assay for the bHLH11-Like Polypeptide

[1294] A DNA-binding assay for AtbHLH6 is provided in Dombrecht et al. (2007), this approach can be used for any bHLH11-like protein. Briefly, a 1000-bp fragment of the AtbHLH6 coding sequence encompassing codons 285 to 623 was amplified from genomic DNA and cloned into the NheI-BamHI-digested pTacLCELD6·His vector (Xue, Plant J. 41, 638-649, 2005). The resulting construct encoded the last 338 amino acids of AtbHLH6 (including the bHLH region) in-frame with the reporter protein CeID and a 6×His tag. Correct amplification and cloning were verified by DNA sequencing.

[1295] Determination of the consensus sequence of the MYC2 DNA binding motif and the relative binding affinity of these sites was done according to Xue (2005), wherein a fusion of a DNA-binding protein (DBP) to 6·His-tagged cellulase D (CELD) serves both as a means for affinity purification of DBP-DNA complex in the selection of binding sites from a pool of biotinylated random-sequence oligonucleotides and as a reporter for measurement of DNA-binding activity.

[1296] For the selection of binding-sites using cellulose paper as an affinity matrix, DBP-CELD was incubated at room temperature for 1 h with 20 ng of a biotin-labelled Bio-RS-Oligo in 40 μl of binding/washing buffer (described above) containing 1 mM EDTA, 0.25 μg ρl⁻¹ poly d(AC-TG), 1 mg ml⁻¹ BSA and 10% glycerol. An appropriate amount of crude DBP-CELD used for binding-site selection was that achieving 20-30% relative cellulose binding efficiency (percentage cellulose activity bound to cellulose after washing). DBP-CELD/Bio-RS-Oligo mixtures were transferred to 96-well microplate wells containing Whatman 1 filter paper (4 mm²) which was pre-soaked with 10 μl blocking solution [binding/washing buffer containing 0.5 μg μl⁻¹ poly d(AC-TG) and 10% glycerol]. After incubation at 0° C. for 1 hr with gentle shaking, the cellulose paper was washed six times with binding/washing buffer containing 1 mM EDTA and 0.1 mg ml⁻¹ BSA. The use of extensive washing in the target site selection was based on observations of the relatively high stability of DBP-oligonucleotide complex immobilized on solid matrix. DBP-CELD carrying target binding sites were eluted at 40° C. for 15 min with 40 μl of cellulase eluting buffer [10 mM HEPES, pH7, 50 mM KCl, 0.2 mM EDTA, 4 mM cellobiose, 0.05 mg ml⁻¹ BSA and 10 μg ml⁻¹ of a sense sequence-specific primer SP-S]. The eluate was used for PCR amplification of selected oligonucleotides. The PCR product (0.1 μl) without purification was used for the next round of site selection.

[1297] Alternatively, 6·His tagged DBP-CELD (10-25 μg crude protein) was incubated in 60 μl of PNT buffer (50 mM sodium phosphate, pH8.0, 300 mM NaCl and 0.05% Tween 20) containing 10 mM imidazole and 350 μg Ni-NTA magnetic agarose beads (Qiagen) at room temperature for 45-60 min with gentle shaking in a micro-tube mixer (Tomy Seiko Co., Tokyo, Japan). The Ni-NTA magnetic beads were collected at the side of the tubes by placing tubes in a 12-tube magnet (Qiagen). Unbound proteins were removed by washing twice with 150-200 μl of PNT containing 20 mM imidazole and once with 60 μl of binding/washing buffer containing 2 mM MgCl₂, 1 mg ml⁻¹ BSA and 10% glycerol. Washed beads were suspended in 40 μl of binding/washing buffer containing 2 mM MgCl₂, 0.25 μg μl⁻¹ poly d(AC-TG), 1 mg ml⁻¹ BSA, 0.0025% Nonidet P-40, 10% glycerol and biotin-labelled oligonucleotides (50 ng Bio-RS-Oligo or 1 μl of PCR product amplified from previously selected oligonucleotides). The suspension was incubated at room temperature for 1.5 h with gentle shaking in the micro-tube mixer. After washing four times (3-4 min each washing) with 150-200 μl of binding/washing buffer containing 2 mM MgCl₂, 0.1 mg ml⁻¹ BSA and 0.0025% Nonidet P-40, the beads carrying target site-bound BDP-CELD were resuspended in 8 μl of 5 mM Tris-Cl (pH 8.0)/0.5 mM EDTA containing 5 μg ml⁻¹ of a sense sequence-specific primer (SP-S) and the suspension was transferred to a clean tube and used for PCR amplification of selected oligonucleotides. The PCR product (1 μl) without purification was used for the next round of site selection.

[1298] For EMSA assays, 6·His-tagged DBP-CELD proteins were purified using Ni-NTA magnetic agarose beads using a high stringent binding buffer (50 mM sodium phosphate, pH8.0, 1 MNaCl, 10% glycerol, 1% Tween 20 and 10 mM imidazole) and the rest of the procedure followed the manufacturer's instruction. Double-stranded synthetic oligonucleotides (30-45 fmol) labelled with digoxigenin at the 3′-end were incubated with a purified DBP (30-75 ng) in 15 μl of binding buffer [25 mM HEPES/KOH, pH 7.0, 50 mM KCl, 0.5 mM DTT, 2 mM MgCl₂, 0.2 μg μl⁻¹ poly d(AC-TG), 0.3 mg ml⁻¹ BSA and 10% glycerol]. After incubation at room temperature for 30 min, DBP/DNA complexes were separated from free probes on a 6% polyacrylamide gel in a 40-mM Tris-acetate buffer (pH 7.5) containing 5 mM Na acetate, 0.5 mM EDTA and 5% glycerol. The DBP/DNA complexes and free probes in the gels after electrophoresis were transferred to a Hybond N [symbol] membrane. Alkaline phosphatase-conjugated anti-digoxigenin antibody and a chemiluminescent substrate, CDP-Star (Roche Diagnostics) was used for detection of digoxigenin according to the manufacturer's instructions. Further details are provided in Xue (2005).

### Example 49

### Cloning of the Nucleic Acid Sequence Used in the Methods of the Invention

[1299] The nucleic acid sequence used in the methods of the invention and comprising SEQ ID NO: 244 was amplified by PCR using as template a custom-made Triticum aestivum seedlings cDNA library (in pCMV Sport 6.0; Invitrogen, Paisley, UK). PCR was performed using Hifi Taq DNA polymerase in standard conditions, using 200 ng of template in a 50 μl PCR mix. The primers used were prm009718 (SEQ ID NO: 254; sense, start codon in bold):

5′-ggggacaagtttgtacaaaaaagcaggcttaaacaatggcggggcanc
cg-3′
and
prm009719 (SEQ ID NO: 255; reverse, complementary):
5′-ggggaccactttgtacaagaaagctgggtatgggtgttgcagctgctg
tt-3′,

which include the AttB sites for Gateway recombination. The amplified PCR fragment was purified also using standard methods. The first step of the Gateway procedure, the BP reaction, was then performed, during which the PCR fragment recombines in vivo with the pDONR201 plasmid to produce, according to the Gateway terminology, an “entry clone”, pbHLH11-like. Plasmid pDONR201 was purchased from Invitrogen, as part of the Gateway® technology.

[1300] The entry clone comprising SEQ ID NO: 244 was then used in an LR reaction with a destination vector used for Oryza sativa transformation. This vector contained as functional elements within the T-DNA borders: a plant selectable marker; a screenable marker expression cassette; and a Gateway cassette intended for LR in vivo recombination with the nucleic acid sequence of interest already cloned in the entry clone. A rice GOS2 promoter (SEQ ID NO: 256) for constitutive expression was located upstream of this Gateway cassette.

[1301] After the LR recombination step, the resulting expression vector pGOS2::bHLH11-like (FIG. 23) was transformed into Agrobacterium strain LBA4044 according to methods well known in the art.

### Example 50

### Plant Transformation

[1302] Transformation of plants was carried out according to the procedure outlined in Example 7

### Example 51

### Phenotypic Evaluation Procedure

### 51.1 Evaluation Setup

[1303] Approximately 35 independent T0 rice transformants were generated. The primary transformants were transferred from a tissue culture chamber to a greenhouse for growing and harvest of T1 seed. Six events, of which the T1 progeny segregated 3:1 for presence/absence of the transgene, were retained. For each of these events, approximately 10 T1 seedlings containing the transgene (hetero- and homo-zygotes) and approximately 10 T1 seedlings lacking the transgene (nullizygotes) were selected by monitoring visual marker expression. The transgenic plants and the corresponding nullizygotes were grown side-by-side at random positions. Greenhouse conditions were of shorts days (12 hours light), 28° C. in the light and 22° C. in the dark, and a relative humidity of 70%. Plants grown under non-stress conditions are watered at regular intervals to ensure that water and nutrients are not limiting to satisfy plant needs to complete growth and development.

[1304] From the stage of sowing until the stage of maturity the plants were passed several times through a digital imaging cabinet. At each time point digital images (2048×1536 pixels, 16 million colours) were taken of each plant from at least 6 different angles.

### Drought Screen

[1305] Plants from T2 seeds are grown in potting soil under normal conditions until they approach the heading stage. They are then transferred to a “dry” section where irrigation is withheld. Humidity probes are inserted in randomly chosen pots to monitor the soil water content (SWC). When SWC goes below certain thresholds, the plants are automatically re-watered continuously until a normal level is reached again. The plants are then re-transferred again to normal conditions. The rest of the cultivation (plant maturation, seed harvest) is the same as for plants not grown under abiotic stress conditions. Growth and yield parameters are recorded as detailed for growth under normal conditions.

### Nitrogen Use Efficiency Screen

[1306] Rice plants from T2 seeds are grown in potting soil under normal conditions except for the nutrient solution. The pots are watered from transplantation to maturation with a specific nutrient solution containing reduced N nitrogen (N) content, usually between 7 to 8 times less. The rest of the cultivation (plant maturation, seed harvest) is the same as for plants not grown under abiotic stress. Growth and yield parameters are recorded as detailed for growth under normal conditions.

### Salt Stress Screen

[1307] Plants are grown on a substrate made of coco fibers and argex (3 to 1 ratio). A normal nutrient solution are used during the first two weeks after transplanting the plantlets in the greenhouse. After the first two weeks, 25 mM of salt (NaCl) is added to the nutrient solution, until the plants are harvested. Seed-related parameters are then measured.

### 51.2 Statistical Analysis: F Test

[1308] A two factor ANOVA (analysis of variants) was used as a statistical model for the overall evaluation of plant phenotypic characteristics. An F test was carried out on all the parameters measured of all the plants of all the events transformed with the gene of the present invention. The F test was carried out to check for an effect of the gene over all the transformation events and to verify for an overall effect of the gene, also known as a global gene effect. The threshold for significance for a true global gene effect was set at a 5% probability level for the F test. A significant F test value points to a gene effect, meaning that it is not only the mere presence or position of the gene that is causing the differences in phenotype.

### 51.3 Parameters Measured

### Biomass-Related Parameter Measurement

[1309] From the stage of sowing until the stage of maturity the plants were passed several times through a digital imaging cabinet. At each time point digital images (2048×1536 pixels, 16 million colours) were taken of each plant from at least 6 different angles.

[1310] The plant aboveground area (or leafy biomass) was determined by counting the total number of pixels on the digital images from aboveground plant parts discriminated from the background. This value was averaged for the pictures taken on the same time point from the different angles and was converted to a physical surface value expressed in square mm by calibration. Experiments show that the aboveground plant area measured this way correlates with the biomass of plant parts above ground. The above ground area is the area measured at the time point at which the plant had reached its maximal leafy biomass. The early vigour is the plant (seedling) aboveground area three weeks post-germination. Increase in root biomass is expressed as an increase in total root biomass (measured as maximum biomass of roots observed during the lifespan of a plant); or as an increase in the root/shoot index (measured as the ratio between root mass and shoot mass in the period of active growth of root and shoot).

[1311] Early vigour was determined by counting the total number of pixels from aboveground plant parts discriminated from the background. This value was averaged for the pictures taken on the same time point from different angles and was converted to a physical surface value expressed in square mm by calibration. The results described below are for plants three weeks post-germination.

### Seed-Related Parameter Measurements

[1312] The mature primary panicles were harvested, counted, bagged, barcode-labelled and then dried for three days in an oven at 37° C. The panicles were then threshed and all the seeds were collected and counted. The filled husks were separated from the empty ones using an air-blowing device. The empty husks were discarded and the remaining fraction was counted again. The filled husks were weighed on an analytical balance. The number of filled seeds was determined by counting the number of filled husks that remained after the separation step. The total seed yield was measured by weighing all filled husks harvested from a plant. Total seed number per plant was measured by counting the number of husks harvested from a plant. Thousand Kernel Weight (TKW) is extrapolated from the number of filled seeds counted and their total weight. The Harvest Index (HI) in the present invention is defined as the ratio between the total seed yield and the above ground area (mm²), multiplied by a factor 10⁶. The total number of flowers per panicle as defined in the present invention is the ratio between the total number of seeds and the number of mature primary panicles. The seed fill rate as defined in the present invention is the proportion (expressed as a %) of the number of filled seeds over the total number of seeds (or florets).

### Example 52

### Results of the Phenotypic Evaluation of the Transgenic Plants

[1313] The results of the evaluation of transgenic rice plants expressing a bHLH11-like nucleic acid under non-stress conditions are presented below. An increase of more than 5% in at least 2 lines was observed for total seed yield, number of filled seeds, fill rate, harvest index, number of first panicles and of at least 3% for thousand kernel weight. Data on the overall increase (measured over all tested lines) for each parameter are presented in Table E6:

TABLE E6

| Parameter | Overall increase (%) |
|---|---|
| Total weight of seeds | 20 |
| (total seed yield) | |
| Number of filled seeds | 20 |
| Fill rate | 18 |
| Harvest Index | 21 |

### VI. ASR (Abscisic Acid-, Stress-, and Ripening-Induced) Protein

### Example 53

### Identification of Sequences Related to the ASR Nucleic Acid Sequence Used in the Methods of the Invention

[1314] Sequences (full length cDNA, ESTs or genomic) related to the nucleic acid sequence used in the methods of the present invention were identified amongst those maintained in the Entrez Nucleotides database at the National Center for Biotechnology Information (NCBI) using database sequence search tools, such as the Basic Local Alignment Tool (BLAST) (Altschul et al. (1990) J. Mol. Biol. 215:403-410; and Altschul et al. (1997) Nucleic Acids Res. 25:3389-3402). The program was used to find regions of local similarity between sequences by comparing nucleic acid or polypeptide sequences to sequence databases and by calculating the statistical significance of matches. For example, the polypeptide encoded by the nucleic acid used in the present invention were used for the TBLASTN algorithm, with default settings and the filter to ignore low complexity sequences set off. The output of the analysis was viewed by pairwise comparison, and ranked according to the probability score (E-value), where the score reflects the probability that a particular alignment occurs by chance (the lower the E-value, the more significant the hit). In addition to E-values, comparisons were also scored by percentage identity. Percentage identity refers to the number of identical nucleotides (or amino acids) between the two compared nucleic acid (or polypeptide) sequences over a particular length.

[1315] Table F1 provides a list of nucleic acid and polypeptide sequences related to the nucleic acid sequence used in the methods of the present invention.

TABLE F1
Examples of ASR nucleic acids and polypeptides.

| | | Nucleic acid | Protein |
|---|---|---|---|
| Name | Plant origin | SEQ ID NO: | SEQ ID NO: |
| Orysa_ASR_1 | Oryza sativa | 396 | 397 |
| Zeama_ASR_1 | Zea mays | 401 | 402 |
| Zeama_ASR_2 | Zea mays | 403 | 404 |
| Zeama_ASR_3 | Zea mays | 405 | 406 |
| Zeama_ASR_4 | Zea mays | 407 | 408 |
| Zeama_ASR_5 | Zea mays | 409 | 410 |
| Zeama_ASR_6 | Zea mays | 411 | 412 |
| Zeama_ASR_7 | Zea mays | 413 | 414 |
| Zeama_ASR_8 | Zea mays | 415 | 416 |
| Zeama_ASR_9 | Zea mays | 417 | 418 |
| Lyces_ASR_1 | Lycopersicon esculentum | 419 | 420 |
| Lyces_ASR_2 | Lilium longiflorum | 421 | 422 |
| Sacof_ASR_1 | Saccharum officinarum | 423 | 424 |
| Zeama_ASR_10 | Zea mays | 425 | 426 |

### Example 54

### Alignment of ASR Polypeptide Sequences

[1316] Alignment of polypeptide sequences is performed using the AlignX programme from the Vector NTI package (Invitrogen) which is based on the popular Clustal W algorithm of progressive alignment (Thompson et al. (1997) Nucleic Acids Res 25:4876-4882; Chenna et al. (2003). Nucleic Acids Res 31:3497-3500). Default values are for the gap open penalty of 10, for the gap extension penalty of 0.1 and the selected weight matrix is Blosum 62 (if polypeptides are aligned). Minor manual editing may be done to further optimise the alignment.

[1317] A phylogenetic tree of GRP polypeptides is constructed using a neighbour-joining clustering algorithm as provided in the AlignX programme from Vector NTI (Invitrogen).

### Example 55

### Calculation of Global Percentage Identity Between ASR Polypeptide Sequences Useful in Performing the Methods of the Invention

[1318] Global percentages of similarity and identity between full length polypeptide sequences useful in performing the methods of the invention are determined using one of the methods available in the art, the MatGAT (Matrix Global Alignment Tool) software (BMC Bioinformatics. 2003 4:29. MatGAT: an application that generates similarity/identity matrices using protein or DNA sequences. Campanella J J, Bitincka L, Smalley J; software hosted by Ledion Bitincka). MatGAT software generates similarity/identity matrices for DNA or protein sequences without needing pre-alignment of the data. The program performs a series of pair-wise alignments using the Myers and Miller global alignment algorithm (with a gap opening penalty of 12, and a gap extension penalty of 2), calculates similarity and identity using for example Blosum 62 (for polypeptides), and then places the results in a distance matrix. Sequence similarity is shown in the bottom half of the dividing line and sequence identity is shown in the top half of the diagonal dividing line.

[1319] Parameters used in the comparison were:
[1320] Scoring matrix: Blosum62
[1321] First Gap: 12
[1322] Extending gap: 2

[1323] A MATGAT table for local alignment of a specific domain, or data on % identity/similarity between specific domains may also be generated.

### Example 56

### Identification of Domains Comprised in ASR Polypeptide Sequences Useful in Performing the Methods of the Invention

[1324] The Integrated Resource of Protein Families, Domains and Sites (InterPro) database is an integrated interface for the commonly used signature databases for text- and sequence-based searches. The InterPro database combines these databases, which use different methodologies and varying degrees of biological information about well-characterized proteins to derive protein signatures. Collaborating databases include SWISS-PROT, PROSITE, TrEMBL, PRINTS, ProDom and Pfam, Smart and TIGRFAMs. Pfam is a large collection of multiple sequence alignments and hidden Markov models covering many common protein domains and families. Pfam is hosted at the Sanger Institute server in the United Kingdom. Interpro is hosted at the European Bioinformatics Institute in the United Kingdom.

[1325] The protein sequences representing the GRP are used as query to search the InterPro database.

### Example 57

### Topology Prediction of ASR Polypeptide Sequences Useful in Performing the Methods of the Invention

[1326] TargetP 1.1 predicts the subcellular location of eukaryotic proteins. The location assignment is based on the predicted presence of any of the N-terminal pre-sequences: chloroplast transit peptide (cTP), mitochondrial targeting peptide (mTP) or secretory pathway signal peptide (SP). Scores on which the final prediction is based are not really probabilities, and they do not necessarily add to one. However, the location with the highest score is the most likely according to TargetP, and the relationship between the scores (the reliability class) may be an indication of how certain the prediction is. The reliability class (RC) ranges from 1 to 5, where 1 indicates the strongest prediction. TargetP is maintained by the Technical University of Denmark.

[1327] For the sequences predicted to contain an N-terminal presequence a potential cleavage site can also be predicted.

[1328] A number of parameters were selected, such as organism group (non-plant or plant), cutoff sets (none, predefined set of cutoffs, or user-specified set of cutoffs), and the calculation of prediction of cleavage sites (yes or no).

[1329] The protein sequences representing the GRP are used to query TargetP 1.1. The “plant” organism group is selected, no cutoffs defined, and the predicted length of the transit peptide requested.

[1330] Many other algorithms can be used to perform such analyses, including:
[1331] ChloroP 1.1 hosted on the server of the Technical University of Denmark;
[1332] Protein Prowler Subcellular Localisation Predictor version 1.2 hosted on the server of the Institute for Molecular Bioscience, University of Queensland, Brisbane, Australia;
[1333] PENCE Proteome Analyst PA-GOSUB 2.5 hosted on the server of the University of Alberta, Edmonton, Alberta, Canada;
[1334] TMHMM, hosted on the server of the Technical University of Denmark

### Example 58

### Cloning of an ASR Nucleic Acid Sequence Used in the Methods of the Invention

### Cloning of SEQ ID NO: 396:

[1335] The nucleic acid sequence SEQ ID NO: 396 used in the methods of the invention was amplified by PCR using as template a custom-made Oryza sativa seedlings cDNA library (in pCMV Sport 6.0; Invitrogen, Paisley, UK). PCR was performed using Hifi Taq DNA polymerase in standard conditions, using 200 ng of template in a 50 μl PCR mix. The primers used were prm06442 (SEQ ID NO: 399; sense, start codon in bold):

5′-ggggacaagtttgtacaaaaaagcaggcttaaacaatggcggaggag
aagca-3′
and
prm06443 (SEQ ID NO: 400; reverse, complementary):
5′-ggggaccactttgtacaagaaagctgggtcggcgacgttgtg
atga-3′,

which include the AttB sites for Gateway recombination. The amplified PCR fragment was purified also using standard methods. The first step of the Gateway procedure, the BP reaction, was then performed, during which the PCR fragment recombines in vivo with the pDONR201 plasmid to produce, according to the Gateway terminology, an “entry clone”. Plasmid pDONR201 was purchased from Invitrogen, as part of the Gateway® technology.

[1336] The entry clone comprising SEQ ID NO: 396 was then used in an LR reaction with a destination vector used for Oryza sativa transformation. This vector contained as functional elements within the T-DNA borders: a plant selectable marker; a screenable marker expression cassette; and a Gateway cassette intended for LR in vivo recombination with the nucleic acid sequence of interest already cloned in the entry clone. A rice GOS2 promoter (SEQ ID NO: 398) for seed specific expression was located upstream of this Gateway cassette.

[1337] After the LR recombination step, the resulting expression vector pGOS2::GRP (FIG. 25) was transformed into Agrobacterium strain LBA4044 according to methods well known in the art.

### Example 59

### Plant Transformation

[1338] Transformation of plants was carried out according to the procedure outlined in Example 7

### Example 60

### Phenotypic Evaluation Procedure

### 60.1 Evaluation Setup

[1339] Approximately 35 independent T0 rice transformants were generated. The primary transformants were transferred from a tissue culture chamber to a greenhouse for growing and harvest of T1 seed. Six events, of which the T1 progeny segregated 3:1 for presence/absence of the transgene, were retained. For each of these events, approximately 10 T1 seedlings containing the transgene (hetero- and homo-zygotes) and approximately 10 T1 seedlings lacking the transgene (nullizygotes) were selected by monitoring visual marker expression. The transgenic plants and the corresponding nullizygotes were grown side-by-side at random positions. Greenhouse conditions were of shorts days (12 hours light), 28° C. in the light and 22° C. in the dark, and a relative humidity of 70%.

[1340] Four T1 events were further evaluated in the T2 generation following the same evaluation procedure as for the T1 generation but with more individuals per event.

[1341] From the stage of sowing until the stage of maturity the plants were passed several times through a digital imaging cabinet. At each time point digital images (2048×1536 pixels, 16 million colours) were taken of each plant from at least 6 different angles.

### Drought Screen

[1342] Plants from T2 seeds are grown in potting soil under normal conditions until they approached the heading stage. They are then transferred to a “dry” section where irrigation is withheld. Humidity probes are inserted in randomly chosen pots to monitor the soil water content (SWC). When SWC goes below certain thresholds, the plants are automatically re-watered continuously until a normal level is reached again. The plants are then re-transferred again to normal conditions. The rest of the cultivation (plant maturation, seed harvest) is the same as for plants not grown under abiotic stress conditions. Growth and yield parameters are recorded as detailed for growth under normal conditions. Plants grown under non-stress conditions are supplied with water at regular intervals to ensure that water and nutrients are not limiting to satisfy plant needs to complete growth and development.

### Nitrogen Use Efficiency Screen

[1343] Rice plants from T2 seeds are grown in potting soil under normal conditions except for the nutrient solution. The pots are watered from transplantation to maturation with a specific nutrient solution containing reduced N nitrogen (N) content, usually between 7 to 8 times less. The rest of the cultivation (plant maturation, seed harvest) is the same as for plants not grown under abiotic stress. Growth and yield parameters are recorded as detailed for growth under normal conditions.

### 60.2 Statistical Analysis: F Test

[1344] A two factor ANOVA (analysis of variants) was used as a statistical model for the overall evaluation of plant phenotypic characteristics. An F test was carried out on all the parameters measured of all the plants of all the events transformed with the gene of the present invention. The F test was carried out to check for an effect of the gene over all the transformation events and to verify for an overall effect of the gene, also known as a global gene effect. The threshold for significance for a true global gene effect was set at a 5% probability level for the F test. A significant F test value points to a gene effect, meaning that it is not only the mere presence or position of the gene that is causing the differences in phenotype.

[1345] Because two experiments with overlapping events were carried out, a combined analysis is performed. This is useful to check consistency of the effects over the two experiments, and if this is the case, to accumulate evidence from both experiments in order to increase confidence in the conclusion. The method used is a mixed-model approach that takes into account the multilevel structure of the data (i.e. experiment-event-segregants). P values were obtained by comparing likelihood ratio test to chi square distributions.

### 60.3 Parameters Measured

### Biomass-Related Parameter Measurement

[1346] The plant aboveground area (or leafy biomass) was determined by counting the total number of pixels on the digital images from aboveground plant parts discriminated from the background. This value was averaged for the pictures taken on the same time point from the different angles and was converted to a physical surface value expressed in square mm by calibration. Experiments show that the aboveground plant area measured this way correlates with the biomass of plant parts above ground. The above ground area is the area measured at the time point at which the plant had reached its maximal leafy biomass.

### Seed-Related Parameter Measurements

[1347] The mature primary panicles were harvested, counted, bagged, barcode-labelled and then dried for three days in an oven at 37° C. The panicles were then threshed and all the seeds were collected and counted. The filled husks were separated from the empty ones using an air-blowing device. The empty husks were discarded and the remaining fraction was counted again. The filled husks were weighed on an analytical balance. The number of filled seeds was determined by counting the number of filled husks that remained after the separation step. The total seed yield was measured by weighing all filled husks harvested from a plant. Total seed number per plant was measured by counting the number of husks harvested from a plant. Thousand Kernel Weight (TKW) is extrapolated from the number of filled seeds counted and their total weight. The Harvest Index (HI) in the present invention is defined as the ratio between the total seed yield and the above ground area (mm²), multiplied by a factor 10⁶. The total number of flowers per panicle as defined in the present invention is the ratio between the total number of seeds and the number of mature primary panicles. The seed fill rate as defined in the present invention is the proportion (expressed as a %) of the number of filled seeds over the total number of seeds (or florets).

### Example 61

### Results of the Phenotypic Evaluation of the Transgenic Plants

[1348] The transgenic rice plants expressing the GRP nucleic acid represented by SEQ ID NO: 396 under control of the GOS2 promoter showed an increase of more than 5% for total weight of seeds, number of filled seeds, and harvest index, when grown under non-stress conditions.

### VII. Squamosa Promoter Binding Protein-Like 11 (SPL11)

### Example 62

### Identification of Sequences Related to the SPL 11 Nucleic Acid Sequence Used in the Methods of the Invention

[1349] Sequences (full length cDNA, ESTs or genomic) related to the nucleic acid sequence used in the methods of the present invention were identified amongst those maintained in the Entrez Nucleotides database at the National Center for Biotechnology Information (NCBI). The sequences search was also carried out in other public and proprietary databases. Sequence search tools were used, such as the Basic Local Alignment Tool (BLAST) (Altschul et al. (1990) J. Mol. Biol. 215:403-410; and Altschul et al. (1997) Nucleic Acids Res. 25:3389-3402). The program is used to find regions of local similarity between sequences by comparing nucleic acid or polypeptide sequences to sequence databases and by calculating the statistical significance of matches. For example, the polypeptide encoded by the nucleic acid used in the present invention was used for the TBLASTN algorithm, with default settings and the filter to ignore low complexity sequences set off. The output of the analysis was viewed by pairwise comparison, and ranked according to the probability score (E-value), where the score reflect the probability that a particular alignment occurs by chance (the lower the E-value, the more significant the hit). In addition to E-values, comparisons were also scored by percentage identity. Percentage identity refers to the number of identical nucleotides (or amino acids) between the two compared nucleic acid (or polypeptide) sequences over a particular length. In some instances, the default parameters may be adjusted to modify the stringency of the search. For example the E-value may be increased to show less stringent matches. This way, short nearly exact matches may be identified.

[1350] Table G1 provides a list of nucleic acid sequences related to the nucleic acid sequence used in the methods of the present invention. Polypeptides with an accession extended by a dot and one digit represent splice variants.

TABLE G1
Examples of SPL11 nucleic acids and polypeptides

| | | | Nucleic acid | Protein SEQ |
|---|---|---|---|---|
| Name | Alias | Plant origin | SEQ ID NO: | ID NO: |
| Arath_SPL11a | At1g27360 | Arabidopsis thaliana | 427 | 428 |
| Arath_SPL11aa | NM_202191 (splicing variant) | Arabidopsis thaliana | 429 | 428 |
| Arath_SPL11aaa | NM_001084135 | Arabidopsis thaliana | 430 | 428 |
| Arath_SPL11aaaa | SEQID NO: 1 Variant MiR156 | Synthetic | 431 | 428 |
| | insensitive | | | |
| Arath_SPL11b | At1g27370 | Arabidopsis thaliana | 432 | 433 |
| Arath_SPL11c | At5g43270 | Arabidopsis thaliana | 434 | 435 |
| Orysa_SPL11a | LOC_Os02g04680 | Olyza sativa | 436 | 437 |
| Orysa_SPL11b | LOC_Os06g49010 | Olyza sativa | 438 | 439 |
| Popth_SPL11a | Populus SPL11a | Populus Species | 440 | 441 |
| Popth_SPL11b | Populus SPL11b | Populus Species | 442 | 443 |
| Popth_SPL11c | Populus SPL11c | Populus Species | 444 | 445 |
| Brara_SPL11a | Br_AC189413 | Brassica rapa | 446 | 447 |
| Zeama_SPL11a | ZM_60752693 | Zea mays | 448 | 449 |
| Zeama_SPL11b | ZM_SPL11b | Zea mays | 450 | 451 |
| Triae_SPL11a | Ta_SPL11a | Triticum aestivum | 452 | 453 |
| Vitvi_SPL11a | Vv_SPL11a | Vitis vinifera | 454 | 455 |

### Example 63

### Alignment of SPL11 Polypeptide Sequences

[1351] Alignment of polypeptide sequences was performed using the AlignX programme from the Vector NTI (Invitrogen) which is based on the popular Clustal W algorithm of progressive alignment (Thompson et al. (1997) Nucleic Acids Res 25:4876-4882; Chenna et al. (2003). Nucleic Acids Res 31:3497-3500). Default values are for the gap open penalty of 10, for the gap extension penalty of 0.1 and the selected weight matrix is Blosum 62 (if polypeptides are aligned). Minor manual editing was done to further optimise the alignment. A consensus sequence comprising highly conserved representative amino acids at each position is given; blanks in between given amino acids in the consensus sequence represent any amino acid. High sequence conservation among SPL11 polypeptides is observed mostly along the SBP domain of the polypeptides. The position of other conserved sequence motifs outside of the SBP domain herein represented by Motif 1 to Motif 4 (SEQ ID NO: 466 to SEQ ID NO: 472) is indicated over the consensus sequence.

[1352] FIG. 28 provides an alignment of representative SPL11 polypeptides.

### Example 64

### Calculation of Global Percentage Identity Between SPL11 Polypeptide Sequences Useful in Performing the Methods of the Invention

[1353] Global percentages of similarity and identity between full length polypeptide sequences useful in performing the methods of the invention were determined using one of the methods available in the art, the MatGAT (Matrix Global Alignment Tool) software (BMC Bioinformatics. 2003 4:29. MatGAT: an application that generates similarity/identity matrices using protein or DNA sequences. Campanella J J, Bitincka L, Smalley J; software hosted by Ledion Bitincka). MatGAT software generates similarity/identity matrices for DNA or protein sequences without needing pre-alignment of the data. The program performs a series of pair-wise alignments using the Myers and Miller global alignment algorithm (with a gap opening penalty of 12, and a gap extension penalty of 2), calculates similarity and identity using for example Blosum 62 (for polypeptides), and then places the results in a distance matrix. Sequence similarity is shown in the bottom half of the dividing line and sequence identity is shown in the top half of the diagonal dividing line.

[1354] Parameters used in the comparison were:
[1355] Scoring matrix: Blosum62
[1356] First Gap: 12
[1357] Extending gap: 2

[1358] Results of the software analysis are shown in Table G2 for the global similarity and identity over the full length of the polypeptide sequences and Table G3 for the similarity on the SBP domain. Percentage identity is given above the diagonal in bold and percentage similarity is given below the diagonal (normal face).

[1359] The percentage identity between the SPL11 polypeptide sequences useful in performing the methods of the invention can be as low as 20% amino acid identity compared to SEQ ID NO: 428. Typically, SPL11 polypeptides have a global (along the sequence of the entire polypeptide) sequence identity in the range of 40%.

[1360] The percentage identity between SBP domains comprised in SPL11 polypeptide sequences useful in performing the methods of the invention can be as low as 30% amino acid identity compared to SEQ ID NO: 456 (SBP domain comprised in Arath_SPL11a or SEQ ID NO: 428). The SBP domains comprised in the SPL11 polypeptides given in Table G1 have a sequence identity in the range of 31 to 93.6%.

TABLE G2
MatGAT results for global similarity and identity over the full length of the
polypeptide sequences.

| Name sequence | 1 | 2 | 3 | 4 | 5 | 6 | 7 | 8 | 9 | 10 | 11 | 12 | 13 |
|---|---|---|---|---|---|---|---|---|---|---|---|---|---|
| 1. Arath_SPL11a | | 75.3 | 37.2 | 31.2 | 30.9 | 38.4 | 34.3 | 29.9 | 31 | 27.5 | 30.7 | 31.4 | 31.5 |
| 2. Arath_SPL11b | 82.3 | | 36.6 | 33.2 | 32.1 | 37.9 | 36.4 | 29.7 | 31.3 | 29.5 | 30.7 | 31.2 | 33.2 |
| 3. Arath_SPL11c | 52.5 | 52 | | 33.6 | 34.9 | 40.4 | 38.6 | 33.7 | 48.5 | 32.9 | 31.8 | 32.4 | 34.4 |
| 4. Orysa_SPL11a | 46.5 | 44.6 | 46.7 | | 54.3 | 36.6 | 38.9 | 38.1 | 25.6 | 46.9 | 49.2 | 66.2 | 34.5 |
| 5. Orysa_SPL11b | 43.8 | 43.4 | 47.8 | 68.2 | | 35.4 | 36.7 | 38.4 | 25.2 | 44.3 | 55.1 | 55.2 | 32.6 |
| 6. Popth_SPL11a | 54.5 | 52 | 54.7 | 49 | 49.1 | | 66.5 | 35.4 | 36.4 | 30 | 32.3 | 35.4 | 44.1 |
| 7. Popth_SPL11b | 46.7 | 48.6 | 52.3 | 55.9 | 53.9 | 71.2 | | 37.7 | 32.7 | 30.7 | 34.7 | 37 | 42.5 |
| 8. Popth_SPL11c | 44.7 | 44.7 | 50.4 | 55.9 | 55.6 | 48.9 | 55.7 | | 25.8 | 33.3 | 34.2 | 35.7 | 37.6 |
| 9. Brara_SPL11a | 41.7 | 42.4 | 55.6 | 34.1 | 34.3 | 46.6 | 40 | 35.2 | | 22.2 | 24.1 | 24.8 | 29.4 |
| 10. Zeama_SPL11a | 42.1 | 42.5 | 44.6 | 61.4 | 58.3 | 42.7 | 45.9 | 51 | 31.5 | | 41.6 | 49.4 | 28.6 |
| 11. Zeama_SPL11b | 44.2 | 44.4 | 46.7 | 60.6 | 66.7 | 47.6 | 50.5 | 50.4 | 35.1 | 53.1 | | 49.5 | 32.1 |
| 12. Triae_SPL11a | 44 | 44 | 46.3 | 77 | 69.5 | 48 | 52 | 53.9 | 33.2 | 62.2 | 61.1 | | 32.8 |
| 13. Vitvi_SPL11a | 44.6 | 43.5 | 47.2 | 50.2 | 50.4 | 53.8 | 55.8 | 55.8 | 36.7 | 46.4 | 46.4 | 50.2 | |

TABLE G3
MatGAT results for similarity and identity over the SBP domain of polypeptide sequences.

| Name sequence | 1 | 2 | 3 | 4 | 5 | 6 | 7 | 8 | 9 | 10 | 11 | 12 |
|---|---|---|---|---|---|---|---|---|---|---|---|---|
| 1. Arath_SPL11a | | 93.7 | 77.2 | 73.4 | 75.9 | 58.3 | 62.2 | 49.5 | 46.6 | 73.4 | 73.4 | 68.2 |
| 2. Arath_SPL11b | 96.2 | | 79.7 | 73.4 | 73.4 | 59.3 | 63.3 | 49.5 | 48.9 | 75.9 | 77.2 | 71.8 |
| 3. Arath_SPL11c | 86.1 | 88.6 | | 81 | 77.2 | 63 | 66.3 | 54.2 | 59.1 | 81 | 78.5 | 74.1 |
| 4. Orysa_SPL11a | 84.8 | 86.1 | 89.9 | | 84.8 | 61.5 | 66.3 | 53.3 | 50 | 88.6 | 83.5 | 80 |
| 5. Orysa_SPL11b | 88.6 | 91.1 | 91.1 | 91.1 | | 59.3 | 64.3 | 50.5 | 47.7 | 87.3 | 83.5 | 78.8 |
| 6. Popth_SPL11a | 64.8 | 67.6 | 68.5 | 65.7 | 66.7 | | 60.6 | 52 | 45.4 | 62.4 | 57.4 | 60.2 |
| 7. Popth_SPL11b | 69.4 | 72.4 | 72.4 | 70.4 | 72.4 | 71.3 | | 45.2 | 41.3 | 66.3 | 62.2 | 61.5 |
| 8. Popth_SPL11c | 63.3 | 64.3 | 65.3 | 64.3 | 66.3 | 66.7 | 65.3 | | 31 | 53.3 | 50.5 | 56.1 |
| 9. Brara_SPL11a | 62 | 64.6 | 68.4 | 63.3 | 64.6 | 56.5 | 55.1 | 43.9 | | 51.1 | 51.2 | 46.8 |
| 10. Zeama_SPL11a | 86.1 | 88.6 | 91.1 | 93.7 | 96.2 | 66.7 | 70.4 | 67.3 | 63.3 | | 88.6 | 84.7 |
| 11. Zeama_SPL11b | 88.6 | 91.1 | 89.9 | 88.6 | 93.7 | 63.9 | 69.4 | 64.3 | 64.6 | 92.4 | | 90.6 |
| 12. Triae_SPL11a | 82.4 | 84.7 | 84.7 | 84.7 | 88.2 | 67.6 | 72.4 | 71.4 | 60 | 88.2 | 90.6 | |
| 13. Vitvi_SPL11a | 90.1 | 93.8 | 90.1 | 87.7 | 90.1 | 70.4 | 75.5 | 67.3 | 64.2 | 88.9 | 87.7 | 87.1 |

### Example 65

### Identification of Domains Comprised in Polypeptide Sequences Useful in Performing the Methods of the Invention

[1361] The Integrated Resource of Protein Families, Domains and Sites (InterPro) database is an integrated interface for the commonly used signature databases for text- and sequence-based searches. The InterPro database combines these databases, which use different methodologies and varying degrees of biological information about well-characterized proteins to derive protein signatures. Collaborating databases include SWISS-PROT, PROSITE, TrEMBL, PRINTS, ProDom and Pfam, Smart and TIGRFAMs. Pfam is a large collection of multiple sequence alignments and hidden Markov models covering many common protein domains and families. Pfam is hosted at the Sanger Institute server in the United Kingdom. Interpro is hosted at the European Bioinformatics Institute in the United Kingdom.

[1362] Table G4 shows the settings (Gathering cut off, trusted cut off and noise cut off) as described in the Pfam database that were used to build the HMMs_fs for SBP different domains.

TABLE G4
HMMs_build information in domain database Pfam Version 21.0
HMMER build information

| | Pfam_ls [Download HMM] | Pfann_fs [Download HMM] |
|---|---|---|
| Gathering cutoff | 25.0 25.0; | 25.0 25.0 |
| Trusted cutoff | 41.4 41.4; | 26.2 54.1 |
| Noise cutoff | 20.8 20.8; | 18.0 11.2 |
| Build method of HMM | hmmbuild -F HMM_ls SEED | hmmbuild -f -F HMM_fs SEED |
| | hmmcalibrate --seed 0 HMM_ls | hmmcalibrate --seed 0 HMM_fs |

[1363] The results of the Pfam scan for representative SPL11 polypeptides of plant origin are presented in Table G5. The amino acid coordinates for SBP domain in the sequence of reference is indicated in the corresponding column. The E-value of the alignment is also given.

TABLE G5
Pfam scan results for the SBP domain (Pfam Reference PF03110) of
representative SPL11 polypeptides as perform on Pfam Version 21.0.

| | Amino acid coordinates | e-value of the |
|---|---|---|
| Name sequence | of the SBP domain | alignment |
| Arath_SPL11a | 174-252 | 1.10E−50 |
| Arath_SPL11b | 175-253 | 1.61E−47 |
| Arath_SPL11c | 168-246 | 1.90E−52 |
| Orysa_SPL11a | 181-259 | 5.10E−50 |
| Orysa_SPL11b | 179-257 | 3.90E−47 |
| Popth_SPL11a | 170-277 | 170-277 |
| Popth_SPL11b | 180-277 | 1.50E−41 |
| Popth_SPL11c | 171-249 | 7.80E−52 |
| Brara_SPL11a | 180-279 | 5.20E−44 |
| Zeama_SPL11a | 161-239 | 2.20E−51 |
| Zeama_SPL11b | 159-237 | 1.10E−48 |
| Triae_SPL11a | 184-262 | 2.90E−52 |
| Vitvi_SPL11a | 171-249 | 7.80E−52 |

### Example 66

### Cloning of the Nucleic Acid Sequence Used in the Methods of the Invention

[1364] The nucleic acid sequence used in the methods of the invention was amplified by PCR using as template a custom-made Arabidopsis thaliana seedlings cDNA library (in pCMV Sport 6.0; Invitrogen, Paisley, UK). PCR was performed using Hifi Taq DNA polymerase in standard conditions, using 200 ng of template in a 50 μl PCR mix. An uspstream and downstream primer as represented by SEQ ID NO: 473 and SEQ ID NO: 474 respectively were used to amplify by PCR (Polymerase Chain Reaction) the coding region of a SPL11 nucleic acid as represented by SEQ ID NO: 427. The primers include the AttB sites for Gateway recombination to facilitate the cloning of the amplified PCR DNA fragment into a Gateway cloning vector.

[1365] The amplified PCR fragment was purified also using standard methods. The first step of the Gateway procedure, the BP reaction, was then performed, during which the PCR fragment recombines in vivo with the pDONR201 plasmid to produce, according to the Gateway terminology, an “entry clone”, pSPL11. Plasmid pDONR201 was purchased from Invitrogen, as part of the Gateway® technology.

[1366] The entry clone comprising SEQ ID NO: 427 was then used in an LR reaction with a destination vector used for Oryza sativa transformation. This vector contained as functional elements within the T-DNA borders: a plant selectable marker; a screenable marker expression cassette; and a Gateway cassette intended for LR in vivo recombination with the nucleic acid sequence of interest already cloned in the entry clone. A rice GOS2 promoter (SEQ ID NO: 476) for constitutive expression was located upstream of this Gateway cassette in the vector pGOS2::SPL11. The SPL11 coding sequence was also cloned in an expression vector comprising a rice WSI18 promoter (SEQ ID NO: 477) for seed specific (ABA inducible) expression (pWSI18::SPL11).

[1367] After the LR recombination step, the resulting expression vectors pGOS2::SPL11 and pWSI18::SPL11 (FIG. 31) were transformed into Agrobacterium strain LBA4044 according to methods well known in the art.

### Example 67

### Plant Transformation

[1368] Transformation of plants was carried out according to the procedure outlined in Example 7

### Example 68

### Phenotypic Evaluation Procedure

### 68.1 Evaluation Setup

[1369] Approximately 35 independent T0 rice transformants were generated. The primary transformants were transferred from a tissue culture chamber to a greenhouse for growing and harvest of T1 seed. Six events, of which the T1 progeny segregated 3:1 for presence/absence of the transgene, were retained. For each of these events, approximately 10 T1 seedlings containing the transgene (hetero- and homo-zygotes) and approximately 10 T1 seedlings lacking the transgene (nullizygotes) were selected by monitoring visual marker expression. The transgenic plants and the corresponding nullizygotes were grown side-by-side at random positions. Greenhouse conditions were of shorts days (12 hours light), 28° C. in the light and 22° C. in the dark, and a relative humidity of 70%. Plants grown under non-stress conditions are supplied with water at regular intervals to ensure that water and nutrients are not limiting to satisfy plant needs to complete growth and development.

[1370] Four T1 events were further evaluated in the T2 generation following the same evaluation procedure as for the T1 generation but with more individuals per event. From the stage of sowing until the stage of maturity the plants were passed several times through a digital imaging cabinet. At each time digital images (2048×1536 pixels, 16 million colours) were taken of each plant from at least 6 different angles.

### Drought Screen

[1371] Plants from T2 seeds were grown in potting soil under normal conditions until they approached the heading stage. They were then transferred to a “dry” section where irrigation was withheld. Humidity probes were inserted in randomly chosen pots to monitor the soil water content (SWC). When SWC went below certain thresholds, the plants were automatically re-watered continuously until a normal level was reached again. The plants were then re-transferred again to normal conditions. The rest of the cultivation (plant maturation, seed harvest) was the same as for plants not grown under abiotic stress conditions. Growth and yield parameters are recorded as detailed for growth under normal conditions.

### Nitrogen Use Efficiency Screen

[1372] Rice plants from T2 seeds are grown in potting soil under normal conditions except for the nutrient solution. The pots are watered from transplantation to maturation with a specific nutrient solution containing reduced N nitrogen (N) content, usually between 7 to 8 times less. The rest of the cultivation (plant maturation, seed harvest) is the same as for plants not grown under abiotic stress. Growth and yield parameters are recorded as detailed for growth under normal conditions.

### 68.2 Statistical Analysis: F Test

[1373] A two factor ANOVA (analysis of variants) was used as a statistical model for the overall evaluation of plant phenotypic characteristics. An F test was carried out on all the parameters measured of all the plants of all the events transformed with the gene of the present invention. The F test was carried out to check for an effect of the gene over all the transformation events and to verify for an overall effect of the gene, also known as a global gene effect. The threshold for significance for a true global gene effect was set at a 5% probability level for the F test. A significant F test value to a gene effect, meaning that it is not only the mere presence or position of the gene that is causing the differences in phenotype.

[1374] When two experiments with overlapping events were carried out, a combined analysis was performed. This is useful to check consistency of the effects over the two experiments, and if this is the case, to accumulate evidence from both experiments in order to increase confidence in the conclusion. The method used was a mixed-model approach that takes into account the multilevel structure of the data (i.e. experiment-event-segregants). P values were obtained by comparing likelihood ratio test to chi square distributions.

### 68.3 Parameters Measured

### Biomass-Related Parameter Measurement

[1375] From the stage of sowing until the stage of maturity the plants were passed several times through a digital imaging cabinet. At each time digital images (2048×1536 pixels, 16 million colours) were taken of each plant from at least 6 different angles.

[1376] The plant aboveground area (or leafy biomass) was determined by counting the total number of pixels on the digital images from aboveground plant parts discriminated from the background. This value was averaged for the pictures taken on the same time from the different angles and was converted to a physical surface value expressed in square mm by calibration. Experiments show that the aboveground plant area measured this way correlates with the biomass of plant parts above ground. The above ground area is the area measured at the time at which the plant had reached its maximal leafy biomass. The early vigour is the plant (seedling) aboveground area three weeks post-germination. Increase in root biomass is expressed as an increase in total root biomass (measured as maximum biomass of roots observed during the lifespan of a plant); or as an increase in the root/shoot index (measured as the ratio between root mass and shoot mass in the period of active growth of root and shoot).

[1377] Emergence vigour was determined by counting the total number of pixels from aboveground plant parts discriminated from the background. This value was averaged for the pictures taken on the same time from different angles and was converted to a physical surface value expressed in square mm by calibration. The results described below are for plants three weeks post-germination.

### Seed-Related Parameter Measurements

[1378] The mature primary panicles were harvested, counted, bagged, barcode-labelled and then dried for three days in an oven at 37° C. The panicles were then threshed and all the seeds were collected and counted. The filled husks were separated from the empty ones using an air-blowing device. The empty husks were discarded and the remaining fraction was counted again. The filled husks were weighed on an analytical balance. The number of filled seeds was determined by counting the number of filled husks that remained after the separation step. The total seed yield was measured by weighing all filled husks harvested from a plant. Total seed number per plant was measured by counting the number of husks harvested from a plant. Thousand Kernel Weight (TKW) is extrapolated from the number of filled seeds counted and their total weight. The Harvest Index (HI) in the present invention is defined as the ratio between the total seed yield and the above ground area (mm²), multiplied by a factor 10⁶. The total number of flowers per panicle as defined in the present invention is the ratio between the total number of seeds and the number of mature primary panicles. The seed fill rate as defined in the present invention is the proportion (expressed as a %) of the number of filled seeds over the total number of seeds (or florets).

### Example 69

### Results of the Phenotypic Evaluation of the Transgenic Plants

[1379] The results of the evaluation of transgenic rice plants expressing a SPL11 nucleic acid corresponding to the construct pGOS2::SPL11 and pWSI18::SPL11 whether under drought stress or non-stress conditions are given herein. An increase of at least 5% was observed for one or more of the following parameters, emergence vigour (seedling early vigour), total seed yield (seed weight), the seed fill rate (seed filling rate), the number of filled seeds, the number of flowers (seeds) per panicle and the harvest index, and of at least 3% for thousand-kernel (1000-seed) weight in the transgenic plants of when compared to the control nullizygote plants in at least one of the growth conditions.

The application's sequence listing, which the Patent Office published only in electronic form, follows.

SEQUENCE LISTING (494 sequences)

SEQ ID NO: 1 - DNA, 753 bp, Arabidopsis thaliana
atgagctgcaatggttgccgtgttctccggaaaggttgcagcgagaattgtatcctccggccatgtattcaatggattgaaaccgccgatgctcaaggccacgccaccgtcttcgtcgctaaattcttcggccgtgctggtctcatgtcctttatctccgctgttccggattctcaacgtcctgctttgtttcagtcgttgctctacgaagcttgtggaagaactgtcaatccagttaacggagcaatcggaatgttatggactggaaactggaatatctgtcaagcggctgttgaaacagtgcttcgcggcggttctttaagaccgatcccggagcttctcactcacggcggcggtttcgctggctttccttcgcctacatctgaagaagcatctgagatctgcaccgaaatgttgaatctccagcaaaatgattccaccgatcgtaacatctatcatcattcacgattctcaagctctagatctagatctactatggattcttcttctccgacgaaacgtaagagattatcatcggaagaccaaccatcttcggagcttgatctatctctcatccctaattttcccattaagcaagcaacaccttcttctacacggcggcgatcagtaacaccgtcgatgaactcagaggactccgggacgacgacgactacgacggcgttttgtgacaagggtgatgtgtacggtaacggaggaggagaaacgaccaagttgcttaacctttttgtttaa

SEQ ID NO: 2 - protein, 250 aa, Arabidopsis thaliana
MSCNGCRVLRKGCSENCILRPCIQWIETADAQGHATVFVAKFFGRAGLMSFISAVPDSQRPALFQSLLYEACGRTVNPVNGAIGMLWTGNWNICQAAVETVLRGGSLRPIPELLTHGGGFAGFPSPTSEEASEICTEMLNLQQNDSTDRNIYHHSRFSSSRSRSTMDSSSPTKRKRLSSEDQPSSELDLSLIPNFPIKQATPSSTRRRSVTPSMNSEDSGTTTTTTAFCDKGDVYGNGGGETTKLLNLFV

SEQ ID NO: 3 - DNA, 53 bp, Artificial sequence
  primer: prm009067
ggggacaagtttgtacaaaaaagcaggcttaaacaatgagctgcaatggttgc

SEQ ID NO: 4 - DNA, 50 bp, Artificial sequence
  primer: prm009068
ggggaccactttgtacaagaaagctgggtactaactctgagaaaaccgcc

SEQ ID NO: 5 - protein, 14 aa, Artificial sequence
  conserved motif 1
  UNSURE (8)..(8): Xaa can be any naturally occurring amino acid
  UNSURE (14)..(14): Xaa can be any naturally occurring amino acid
MSCNGCRXLRKGCX

SEQ ID NO: 6 - protein, 14 aa, Artificial sequence
  conserved motif 2
  UNSURE (2)..(3): Xaa can be any naturally occurring amino acid
  UNSURE (6)..(6): Xaa can be any naturally occurring amino acid
  UNSURE (8)..(8): Xaa can be any naturally occurring amino acid
  UNSURE (12)..(12): Xaa can be any naturally occurring amino acid
QXXATXFXAKFXGR

SEQ ID NO: 7 - protein, 10 aa, Artificial sequence
  conserved motif 3
  UNSURE (2)..(2): Xaa can be any naturally occurring amino acid
  UNSURE (6)..(6): Xaa can be any naturally occurring amino acid
  UNSURE (9)..(9): Xaa can be any naturally occurring amino acid
FXSLLXEAXG

SEQ ID NO: 8 - protein, 5 aa, Artificial sequence
  DP(V/I)YG signature
  VARIANT (3)..(3): /replace = "Ile"
DPVYG

SEQ ID NO: 9 - protein, 15 aa, Artificial sequence
  conserved Cys motif
  UNSURE (2)..(3): Xaa can any naturally occurring amino acid
  UNSURE (5)..(10): Xaa can any naturally occurring amino acid
  UNSURE (12)..(14): Xaa can any naturally occurring amino acid
CXXCXXXXXXCXXXC

SEQ ID NO: 10 - DNA, 2194 bp, Oryza sativa
aatccgaaaagtttctgcaccgttttcaccccctaactaacaatatagggaacgtgtgctaaatataaaatgagaccttatatatgtagcgctgataactagaactatgcaagaaaaactcatccacctactttagtggcaatcgggctaaataaaaaagagtcgctacactagtttcgttttccttagtaattaagtgggaaaatgaaatcattattgcttagaatatacgttcacatctctgtcatgaagttaaattattcgaggtagccataattgtcatcaaactcttcttgaataaaaaaatctttctagctgaactcaatgggtaaagagagagattttttttaaaaaaatagaatgaagatattctgaacgtattggcaaagatttaaacatataattatataattttatagtttgtgcattcgtcatatcgcacatcattaaggacatgtcttactccatcccaatttttatttagtaattaaagacaattgacttatttttattatttatcttttttcgattagatgcaaggtacttacgcacacactttgtgctcatgtgcatgtgtgagtgcacctcctcaatacacgttcaactagcaacacatctctaatatcactcgcctatttaatacatttaggtagcaatatctgaattcaagcactccaccatcaccagaccacttttaataatatctaaaatacaaaaaataattttacagaatagcatgaaaagtatgaaacgaactatttaggtttttcacatacaaaaaaaaaaagaattttgctcgtgcgcgagcgccaatctcccatattgggcacacaggcaacaacagagtggctgcccacagaacaacccacaaaaaacgatgatctaacggaggacagcaagtccgcaacaaccttttaacagcaggctttgcggccaggagagaggaggagaggcaaagaaaaccaagcatcctccttctcccatctataaattcctccccccttttcccctctctatataggaggcatccaagccaagaagagggagagcaccaaggacacgcgactagcagaagccgagcgaccgccttctcgatccatatcttccggtcgagttcttggtcgatctcttccctcctccacctcctcctcacagggtatgtgcctcccttcggttgttcttggatttattgttctaggttgtgtagtacgggcgttgatgttaggaaaggggatctgtatctgtgatgattcctgttcttggatttgggatagaggggttcttgatgttgcatgttatcggttcggtttgattagtagtatggttttcaatcgtctggagagctctatggaaatgaaatggtttagggatcggaatcttgcgattttgtgagtaccttttgtttgaggtaaaatcagagcaccggtgattttgcttggtgtaataaagtacggttgtttggtcctcgattctggtagtgatgcttctcgatttgacgaagctatcctttgtttattccctattgaacaaaaataatccaactttgaagacggtcccgttgatgagattgaatgattgattcttaagcctgtccaaaatttcgcagctggcttgtttagatacagtagtccccatcacgaaattcatggaaacagttataatcctcaggaacaggggattccctgttcttccgatttgctttagtcccagaattttttttcccaaatatcttaaaaagtcactttctggttcagttcaatgaattgattgctacaaataatgcttttatagcgttatcctagctgtagttcagttaataggtaatacccctatagtttagtcaggagaagaacttatccgatttctgatctccatttttaattatatgaaatgaactgtagcataagcagtattcatttggattattttttttattagctctcaccccttcattattctgagctgaaagtctggcatgaactgtcctcaattttgttttcaaattcacatcgattatctatgcattatcctcttgtatctacctgtagaagtttctttttggttattccttgactgcttgattacagaaagaaatttatgaagctgtaatcgggatagttatactgcttgttcttatgattcatttcctttgtgcagttcttggtgtagcttgccactttcaccagcaaagttc

SEQ ID NO: 11 - protein, 307 aa, Oryza sativa
MRMSCNGCRVLRKGCSDNCAIRPCLQWIRSPDAQANATVFLAKFYGRAGLINLITAGPEHVRPAIFRSLLYEACGRMLNPVYGSVGLLWSGNWQLCQSAVESVLRGMPIAQPPPSATAVPPLPTCDIRHVGARRGDVHGAAAGPVADLHRLDISSRAKFKRPGGGAAAAHRSDHAAFELVFSKPAAAMAVDVIRQAQPLNWAPGALSHESASHDAAPPESEGHSNDTADTVDGSHVSQSEPEPRATSAATEVHDAGLDLTLGLPPPPPPVQKTEPADSDGGSQQQHDHRKEKPVELGLAISTKVAAQ

SEQ ID NO: 12 - protein, 330 aa, Oryza sativa
MRMSCNGCRVLRKGCSEGCTIRPCLQWIKTPEAQANATVFLAKFYGRAGLLNLLAAGPDHLRPAVFRSLLYEACGRIVNPIYGSVGLLWSGQWQACQAAVEAVLKGDPVVQVSSEAAAAAQATPPLRAYDIRHVSKDAEADAAANLLRVARGGRTRFKRASSSSNSKHGAKLAGAAAAKRAASPSSSSPTHETEPEAVVVVGDHDDDHHHPALSHEVHEESAGSHDHDDDDHVDDGDNNDMAIADVTPPRAGSEDTEVETGSHVSQAEQSPVPVEHEEGEEEEVGLELTLGFQPLVVRASRRPSSAEARCDLSGLSAESSRIGLRLELPA

SEQ ID NO: 13 - protein, 204 aa, Oryza sativa
MSCNGCRVLRKGCSDGCVLRPCLQWIDAADAQGHATVFVAKFFGRAGLLSFISAVPEAQRPALFQSLLYEAAGRTINPVHGAVGLLWTGNWPLCQAAVETVLRGGAIGPLPELGGACGGAGGDLYGAAKRNGGWSTFSTAKRVRKAEVPEAPSCDLGLCLSPGSPPAVGERKPALRPGTPSMSSDESGTTTGGERDPVLLNLFV

SEQ ID NO: 14 - protein, 232 aa, Oryza sativa
MSCNGCRVLRKGCSDACVLRPSIEWIDGAQPQANATVFVAKFFGRAGLVASLAAVPLHHRPALFRSLLYEACGRTINPVSGAIGLMWTGNWDLCQAAADAVLRGDSLRALSAVPAAFTDRDMAGLYGNVGAAAGTSSSSPDNDNSSASAAPRRKRPRNNGAGAGVGQQQLPHAVAAVLQSCELDLCLTPVSPPAVQLVGGGGGASDEHSTTTCEEASDGDGAGAPTLLNLFS

SEQ ID NO: 15 - protein, 226 aa, Oryza sativa
MSCNGCRVLRKGCSEGCVLRPCLQWIDGAEAQGHATVFVAKFFGRAGLMSFLTAVPEPQRAAVFQSLLYEAAGRTINPVGGAVGLLSGGSWHLCQAAVDTVLRGGGIQPLPDQVDAAAAGGRDVFASTARRAMGGCSTFSTAKRSTTTTTTKNPGTPHDAAAAAPQPEPSCDLGLWLSPGSPPAPGDRRSGGRRADTPSMNSEGSVTTCGVVGDGEREPELLNLFV

SEQ ID NO: 16 - protein, 224 aa, Nicotiana benthamiana
MSCNGCRVLRKGCSENCILRPCLQWIETAESQGHATVFVAKFFGRAGLTSFISAVPENQRPSLFQSLLYEAAGRTVNPVNGAVGLLWTGNWHVCQAAVETVLRGGALRPIPDFLGASLDIDESSECTDIFKLQHPSQNNIQPTMQKRRRFPEEASNVLQLADLDLSLTPGFQSQKVFNHALPENRRPATPSMNSEESGTTTCFESGTVIGNHQGNEPKLLSLFN

SEQ ID NO: 17 - protein, 230 aa, Glycine max
MSCNGCRVLRKGCSESCILRPCLQWIETAEAQGHATVFVAKFFGRAGLMSFISNVPENQRPALFQSLLFEACGRTVNPVNGAVGLLWTGNWHVCQAAVETVLRGGTLRPMPELMGLDAAAAAAAAADETSEAEVGCTDTWRIRNPNTNCRFTSSRSSSGGGGGKRKRSEELAKLQEQQPNLDLRLTPVFLQKEESRRPESPSMTSEESGTTTENRFGDQWSHWKVLNLFI

SEQ ID NO: 18 - protein, 240 aa, Glycine max
MSCNGCRVLRKGCSESCILRPCLQWIDTPEAQGHATVFVAKFFGRADLMSFISNVPEPQRPALFQSLLFEACGRTVNPVNGAVGLLWTGNWHVCQAAVETVLRGGTVRPMPELFGLDAPTPTTDDASEGEVTCTDKWRVRDPNPNFRFPGSRSDKGSSGGKRKRFEELAKLQTATTDLNLRLTPSFLQNAANFGCRQEIRWPGSPSMNSEESGTTTACLESGIGDHYAPDGDRKVLNLFI

SEQ ID NO: 19 - protein, 222 aa, Hordeum vulgare
MSCNGCRVLRKGCNDACMLRPCLLWIEGADAQGHATIFAAKFFGRAGLMSFLTAVPESQRPAVFQSLLYEAAGRTINPVGGAVGLLWAGSWHLCEAAVQTVLRGGAIRPLPELAGGVPEGGVGGSDLFASSSRRAVVGCSTYSMAKRVTPRKTWAPEAASHHQEPSCDLGLFLTPGSAAAAEGERRARRAGTPSMSSDGSVTTTAGAGADGDKEPELLNLFV

SEQ ID NO: 20 - protein, 235 aa, Sorghum bicolor
MSCNGCRVLRKGCSEACVLRPCLQWIDAADAQGHATVFVAKFFGRAGLLSFISAVPDAQRPALFQSLLYEAAGRTINPVHGAVGLLGTGNWHLCQAAVDTVLRGGAIGPLPELGITGSAGDLYGPPGAGTGHGGGGGKRAGGWSTFSTAKRVRKAAATGAPPPPPAAEPEASCDLRLCLLSPGSPPPPAGDRRAPFMRPGTPSITSDDDSVTTTTTTTTTGGGGDREPVLLNLFA

SEQ ID NO: 21 - protein, 231 aa, Aquilegia sp.
MSCNGCRVLRKGCSESCILRPCLQWIESPEAQGHATVFIAKFFGRAGLMSFISSVPESQRPALFQSLLFEACGRTVNPVNGAVGLLWTGNWHICQAAVETVLRGGTLRPINEVLGASLMMMPESADEMSEVITTTQDPTYSRPKVMHIKKKEIIHENVNKIMIHDLDLSLTSGSSSPRKTTKRSTTPSTEESVTTSLDSGAGVWRDDHYLRRGSGEDNNNNGDQKLLNLFV

SEQ ID NO: 22 - protein, 228 aa, Vitis vinifera
MSCNGCRVLRKGCSESCILRPCLQWIESAESQGHATVFVAKFFGRAGLMSFISAVPENQRPALFRSLLYEACGRTVNPVNGAVGLLGTGNWHVCQAAMETVLRGGTLRAMPELLNGVSTPECDEASEAEVTCTDMFKLRDPNSSSRSKVPKRKRLEEASKVQCTDLDLRLTPGLTGKISSRGLGAMSYLPETRRPGTPSMNSEESVTTTCFETPHSPEGERKLLNLFL

SEQ ID NO: 23 - protein, 237 aa, Lotus japonicus
MSCNGCRVLRKGCSESCILRPCLQWIDTAEAQGHATVFVAKFFGRADLMSFISNVPQPQRPSLFQSLLFEACGRTVNPVNGAVGLLWTGNWHVCQAAVETVLRGGTLKPLPELLGLDAPSHVPTAADDASEGEVTYDTWRIRDPNPNARLTNSRSSAGKRQRPEELAKLQTTTDLNLRLTPGFLQNVSSYGCKREARRPGSPSMNSEESVTTTACLGSGIGDHCSRDEDRKVLKLFV

SEQ ID NO: 24 - protein, 232 aa, Gossypium hirsutum
MSCNGCRVLRKGCSESCILRPCLQWIESPEAQGHATVFVAKFFGRAGLMSFISAVPESQRPALFQSLLFEACGRTVNPVNGAVGLLWNGNWHVCQAAVETVLRGGSLRSMPELMAPTPASDEASEATCTDMWKLRETSTNLNSNCRFSNSRSRVSPKRKRVEEEFKKLQPSDLDLGLTPSFTGKRVTDNRRPGTPSMNSEESVTTTCFESVFADQQGQGSRGTDKKLLKLFV

SEQ ID NO: 25 - protein, 287 aa, Triticum aestivum
MRLSCNGCRVLRKGCSEDCSIRPCLQWIKSPEAQANATVFLAKFYGRAGLMNLINAGTDDSLRPGIFRSLLYEACGRIVNPIYGSVGLLWSNNWQMCQAAVEAVLSGKPIVQVSSEDAAADRTPPLKAYDIRHVSTSPAADGRLHKVAKPGRTRFKRASSASSHHNPSSDSNNKPKPKPQPQTRAPTAEEERDRQHRKEMEEGAFQRAPSHESSDSRHEDPVEPHCQQEASADTEAEAGSHVSQAEQEQSTEPAAEHAEEVEKEDEELGLELTLGFAPVAARPAEFT

SEQ ID NO: 26 - protein, 274 aa, Solanum tuberosum
MRMSCNGCRVLRKGCSKSCSIRPCLQWIKTPDSQSNATVFLAKFYGRAGLMNLINAGPDHLRPAIFRSLLYEACGRIVNPIYGSVGLLWSGNWQLCQNAVEAVLKGTPITPIASEIAVNNNGPPLKLPYDIRHINKDENSTKSSELHRVRTRCRFKRSGANTKATKSNPACSGSGDEFAHEKVNGSTSHESSLSHQSEEEAAAAAAVALNVECESPEMAEVEDSAKADGEVELELTLGFSSLGTVEGKPKETKRNKGVQLVDGAGECKIELGLH

SEQ ID NO: 27 - protein, 301 aa, Medicago truncatula
MRMSCNGCRVLRKGCSENCSIRPCLQWIKSPESQANATVFLAKFYGRAGLMNLVNAGPEHLRPAIFRSLLYEACGRIVNPIYGSVGLLWSGSWQLCQAAVEAVLKGAPITPITSEAAANGRGPPLKAYDIRHVSKEENSAASTELTQQRVKPRSRKRSSLAKLKIQEEEKSSNDNKGVESGSTEPTGSVEPVEEVMNRSVSHESSISHQSEAVAVVDGESKDSESETSMILFRDEPELDRKMKPADRTGENGEEKVGLELTLGLEPVSRVYHVVPVKKRRVVLKDCGVGSWNVELGLQYPA

SEQ ID NO: 28 - protein, 302 aa, Hordeum vulgare
MRLSCNGCRVLRKGCSEDCSIRPCLQWIKSPEAQANATVFLAKFYGRAGLMNLINAGTDDSLRPGIFRSLLYEACGRIVNPIYGSVGLLWSNNWQMCQAAVEAVLSGKPIVQVSSEDAAADRTPPLKAYDIRHVSTSPAADGRLHKVAKPGRTRFKRASSASSHHNPSSDSNNKPKPQPRPPTAEEELDRQHRKEMEEGAFQRAPSHESSDSRHEDPVEPHSQQEASADTEAEAGSHVSQAEQEQEQSTEPAADHAEEVEKDDEELGLELTLGFAPVAARPAGCHLSVRTAAEPAFVGLRFL

SEQ ID NO: 29 - protein, 253 aa, Vitis vinifera
MRMSCNGCRVLRKGCSDDCSLRPCLEWIKTPESQANATVFLAKFYGRAGLMNLLNAGPEHLRPAIFRSLLYEACGRIVNPIYGSVGLLWSGNWNHCQNAVDAVLGGSQIMEVPCDTAAIRPILPLKAYDIRHLSKDANSPHDLHKAKTRSRFKRCGARSKPHLDSAEFCNPGWNQFSPVDYNRAPSHDSSLIQQETDSMFSVETVEASLATPPKPNQLLKSDGQTDKTEAGLELTLGFYPISRPHACKLELGP

SEQ ID NO: 30 - protein, 234 aa, Solanum tuberosum
MRMSCNGCRVLRKGCSENCSLRPSLQWIKSPDSQANATVFLAKFYGRAGLINLINAGPDHLRPAIFRSLLYEACGRIINPVNGSVGLMCSGNWQRCQEAVESVLKGSTIMQVPINNDDDNNNNNNNNTDQIVPLKGCDIRHVSKNNSTNSDNQQVIKTRKGRLKRKGTFDSVASASAEAEAAEEYLLKNQPPLKFSIAGWDQFEEIDDELIKRAASHDSFSVETVELTLLGEPG

SEQ ID NO: 31 - protein, 334 aa, Pinus taeda
MRVSCNGCRVLRKGCSDSCELRPCLQWIKTSESQAQATVFLAKFYGRSGLMNLIKSGPEFLRPTLFRSLLYEACGRIVNPIFGSVGLIWSGNWHICQAAVESVLKGYPLQPLHPLNSLEIASPPPAAAAPQSMKAVADKLRNVRSQGRFKRPLYRKPSRDVKNLNLHALKDEEAAGILTGSQAYNLRWRRCYPKEFQLINAQPVNNFLSIDSSSDSDDLIRLKTGFESVKSDCNPIENRETRALSEGISEGPALSEGIENQNECPLQNLFQQNDNNWVENNIMRTELTDERNLGLELTLGSSMGETTQSHRKQLGSNCMDRPPLYRSLDLSLSQ

SEQ ID NO: 32 - protein, 336 aa, Pinus taeda
MRMSCNGCRVLRKGCSETCIIRPCLQWIKNEESQANATVFLAKFYGRAGLMNLISAGPEHLRPAIFKSLLYEACGRMVNPIFGSVGLLCSGNWQLCQAAVESILKGCPIHPILVDSSGTQMPTERSNTNPSVRSTLMETITNELHKVKTKGRFKRRKSTVKDVSLNNSDAEDLGASQVFNLRWRRCYPGESQTPALEGIPNHLVSSDSSCESLEHFDDLRNHKEADMEGHMSKAMDMGPVNIKCCSDQNDHKATMESVPEVSYTQAPDLEDMQAIKHEYESISSDVTDVKLELTLSSQGSATHAAEKHHTNLHWNSCMEHSDEPTITYLGLGLTQA

SEQ ID NO: 33 - protein, 184 aa, Glycine max
MRMSCNGCRVLRKGCSEDCSIRPCLQWIKNPESQANATVFLAKFYGRAGLMNLINAGPENLRPAIFRSLLYEACGRIVNPIYGSVGLLWSGSWQLCQAAVEAVLKGEPITPITSEAAANGRAPPLKAYDIRHVSKDQNSANETPKTKTRSRFKRTSGTLIKPKASKGTGFVPVEPEMANPDCES

SEQ ID NO: 34 - protein, 230 aa, Triticum aestivum
MSCNGCRVLRKGCSDACVLRPSIEWIDGAQPQANATVFVAKFFGRAGLVASLAAVPLHHRPALFRSLLYEACGLTINPVSGAIGLMWTSNWDLCQAAAEAVLRGDSLRSLSAVPAAFTERDMAGLYGNVGTNTGSSSSLHSSPENSTSAPARKRSKNNCGAAVGQQVKLPGPGPVLQSCELDLCLTPLSSPLAGGRRGGASDEYSTTTCCEEASGDAAEAGAPPLLNLFN

SEQ ID NO: 35 - protein, 290 aa, Aquilegia sp.
MRMSCNGCRVLRKGCSENCSIRPCLQWIKTPESQANATVFLAKFYGRAGLMNLINSGPEHLRPAIFRSLLYEACGRIVNPIYGSVGLLWSGSWQLCQAAVEAVLKGTPIMQISSEVAAISPSPPLKAYDIRHVSKDENSSAASQELHKVKTRSRFKRSGAGKAANNKQVNESNKVHTYLDRAPSHESSVSHQTELNNGEGCSRETESMFSVETVEASLVNRADPEPVPKFDNFNGSDADDNNNDDVELELTLGFEPSRREKSMSPKKWRDEINNSYTDTCKIEVGIDYAV

SEQ ID NO: 36 - protein, 217 aa, Solanum tuberosum
MSCNGCRVLRKGCSDNCILRPCLQWIETPEAQGHATVFVAKFFGRAGLMSFISAVPENQRPALFQSLLYEAAGRTVNPVNGAVGLLWTGNWHVCQAAVETVLRGGALRPISEFLGASVEIDEVSDCTDVFKLQDPSLNMRPKMQKRRRFPEETSMLADLDLSLTPGFNQKVYNSHPLAENHRRPGTPSMNSEESGTTTCFESTAVIGEEPKLLSLFN

SEQ ID NO: 37 - protein, 212 aa, Solanum tuberosum
MSCNGCRVLRKGCSDNCILRPCLQWIETPEAQGHATVFVAKFFGRAGLMSFISAVPENQRPALFQSLLYEAAGRTVNPVNGAVGLLWTGNWHVCQAAVETVLRGGALRPISEFLGASVEIDEVSDCTDVFKLQDPRKMQKRRRFPEETSMLADLDLSLTPGFNQKVYNSHPLPENHRRPGTPSMNSEESGTTTCFESTAVIGEEPKLLSLFN

SEQ ID NO: 38 - protein, 217 aa, Solanum tuberosum
MSCNGCRILRKGCNENCILRQSLQGIESPHAQANATVFVAKFFGRAGLMSFLTSVSESQRPALFQSLLFEACGRTVNPVHGAVGLLWTGNWHVCQSAVETVLKGGVLRPLPEFSGVTASPEFDSEANDVDLFRSQSSNFQSKRKIIDEVSEDLDLGLTSGLSTMVTGGKLNRRTEKRRAATPSLNSDESDTTTLESGVVYHQNPQQGNETKLLRLFF

SEQ ID NO: 39 - protein, 277 aa, Picea alba
MSATDKNITERKEQQRKMSCNGCRVLRKGCSDNCILRQSLQWIESPQSQAHATVFVAKFFGRAGLMTFIATVSEPERPDLFKSLLYEACGRTVNPVHGAVGLMWTGKWQICQAAVQTVLSGGSLDRTPASPWFPLTDANGDRNRMSAGDQWPNETDVGNYPGDDDVCKIYELDACVDSRRVRQKIDGSNNNNNEIASTDADKLGQRGSGIDGQKNDIKLDLSLNCSSKSKSSNLKQQRVSSPSTNSVHSEGSVNRLKISNPLPSSTMASQQKFLDLL

SEQ ID NO: 40 - protein, 363 aa, Pinus taeda
MTATTGAGNSGRDLSVFIQRKQEADGRKRMSCNGCRVLRKGCSDTCILRPCLQWIESPEAQGHATVFVAKFFGRAGLMSFISAVPDHQRPALFQSLLYEACGRTVNPVNGAVGLLWNGNWQLCQAAVETVLKGGTLRPPQSSSVIPTCSTRPSLMNSFSANFRVNSNVNNINSSGSRLSLEVGKARPVNEMREMYTVKPEVDFPLNRPQESCNPHQPWAAKVKSEPHDLTLCEAFEAVRHSQTIIHSPPSEIAAAPRRVRQRIEGINEVNYRDLSNSNSDDVKCLGVFDIHPNNTMEMKANLDLTLNFEASSSSHIKRRVSSPSIVSVNSEGSVTSLESGSLRVPNQKDSSAAKEHKVLDLFP

SEQ ID NO: 41 - protein, 276 aa, Pinus taeda
MSATENHITERKEQERKMSCNGCRVLRKGCSENCILRQSLQWIESPQSQAHATVFVAKFFGRAGLMTFIAAVSEPERPALFKSLLYEACGRTVNPVHGAVGLLWTGKWQICQAAVQTVLSGGSLDRTPAGTCFPSTDANGDRNGMSDGDQWPNEMDGNFPGDDDVCKIYELGACDDSRRVRQKIDGNNNNINELMSTDGEKLGQRGSGIDGQKNDLKLDLSLNCPSKSKSSNLKQQRVSSPSTNSVHSEGSVNRLKSSSPPPSSTMAAEQKLLDLL

SEQ ID NO: 42 - protein, 218 aa, Lycopersicon esculentum
MSCNGCRVLRKGCSDNCILRPCLQWIETPEAQGHATVFVAKFFGRAGLMSFISAVPENQRPALFQSLLYEAAGRTVNPVNGAVGLLWTGNWHVCQAAVETVLRGGALRPISEFLGASVEIDEVSDCTDVFKLQDPSLNMRPKMQKRRRSPEETSMLDLSLTPGFNQKVYNSHPLPENHRRPGTPSMNSEESGTTTCFESSAVIGDHQGKEPKLLSLFN

SEQ ID NO: 43 - protein, 238 aa, Populus tremuloides
MSCNGCRVLRKGCSENCILRPCLQWIESPEAQGHATVFVAKFFGRAGLMSFISAVPENQRPSLFQSLLFEACGRTVNPVNGAAGLLWTGNWHVCQAAVETVLRGGTLQPMPELLTGGGGSPSPSSDEASEVEVACTDIWKLQDPNPNHHPRFSISRSRLSPKRKRTEEPVAVKVQHNDLDLGLTPSFSLKGFPYKQQIRRPGTPSMNSAESVTTNTACFDSAGLGDEGGETKLLNLFL

SEQ ID NO: 44 - protein, 242 aa, Populus tremuloides
MSCNGCRVLRKGCSENCILRPCLQWIESPEAQGHATVFVAKFFGRAGLMSFISSVPEDQRPSLFQSLLFEACGRTVNPVNGAVGLLWTGNWHVCQAAVETVLRGGTLRPMPDLLTGGGSPSSSPPSDEASEFEVACTDIWKLQDPNPNPIHHSRFSNSRSRVSSKRKGTEEPMVVNMRHDDLDLLLTPSTSQKGFAEICRPGTPSMNSEESVTTNATCFDSAGFGDQYGNGGGETKLLNLFL

SEQ ID NO: 45 - protein, 208 aa, Populus tremuloides
MSCNGCRVLRKGCSETCVLRSCLHWIPTPEAQGNATLFLAKFFGRSDLISLISAVPESQRPVLFQSLLFEACGRTVNPVNGAVGLLWSGNWHVCQAAVESVLAGETLRPLPGILTGVLAPNCDESSDSFSAAAYAVHSMTWNQSKPFDKENNNQVVSDHHVNLCLARGRGGRDKRGRDAVSFYTGGESETTSFESSGADKNKLLNLFV

SEQ ID NO: 46 - protein, 208 aa, Populus tremuloides
MSCNGCRVLRKGCSETCVLRSCLHWITNPEAQGNATLFLAKFFGRSDLMSLISAVPEAQRPALFQSLLFEACGRTVNPVNGVVGLLWSGNWHMCQEAVETVLSGGALQPLPGILTGVLAPNCDESSDRFSAAAYAVHNMARNQSRSFAKENNKEVVSDHRINLCLARGKGGRDKRGRDAVSFYTGGESETISFESSGGDKKRLLNLFV

SEQ ID NO: 47 - protein, 296 aa, Populus tremuloides
MRMSCNGCRVLRKGCSENCSIRPCLQWIKSSESQANATVFLAKFYGRAGLMNLINAGPEHLRPAIFRSLLYEACGRIVNPIYGSVGLMWSGSWQLCQAAVEAVLKGAPITPINSEAAVNGHGPPLKVYDIRHVSKEENSAASNDANRARTRCRVRRVVKPKASKRACFGNGLASIAVDTLSARDELTRCTSHESSVSHQSELAVLDGDSKESDESMVSVETAEASLLFPPNPESKNDCKAHDVASNGISGLELGLDLTLGLEPVSRAHHVVPVKKRRVEAYGSGDVDTCKMELRLE

SEQ ID NO: 48 - protein, 241 aa, Populus tremuloides
MSCNGCRVLRKGCNDNCTIRPCLQWIKSTDSQANATLFLAKFYGRAGLINLIEAAPQRLRPAIFSSLLYEACGRIVNPVYGSVGMLWSGNWAQCQAAVDAVLKGLPIISIPSSDVPTPHLISSLNTYDIRHVSRDQNSPELNKVKSRTRCKRSIGTRPSSLAEPTGRLNQGELGFEPVRESWLGHLGNGDSRIKDEDSILAAENVEDSLWSRVEPDQVFKFNGQSDDSDLSLELTLALVSE

SEQ ID NO: 49 - protein, 273 aa, Populus tremuloides
MPFSALSFSSLPHRIILLLIGFLNSSPSLSRHFSISFRTEYTMRMSCNGCRILRKGCGDNCSIKPCLQWIETPDSQANATLFLAKFYGRAGLMNLINACPQHLRPDTFKSLLYEACGRIVNPVSGSVGLLSTGSWQQCQAAVEAVLKGEPITQIASTDQLTLGGSDTRHVSREEDWSASDQPRKIKSKRQFNRSTSKRKPSRTEAEHTCFEFMIGFDGLRSVSPDSVLSWRPSLGSDNEETDSIGSVETVEASKLDEPAEGSDLDLDLTLGHY

SEQ ID NO: 50 - protein, 231 aa, Caragana korshinskii
MSCNGCRVLRKGCSESCILRPCLQWLENPEAQGHATVFVAKFFGRAGLMSFLSNVPETQRPALFQSLLFEACGRTVNPVNGAVGLLWTGNWHVCQAAVETVLQGGTLRPLPEHTLLDAPPAATDEASEAEDACTGIWRIRDPNPNCRPNGSRSNNKVSTGGKRKRSEELVKIPAATNLDLRLTPIFLQKESESRRPGSPSMNTEESVTTTATGLGDSWGHGGERKVLNLFI

SEQ ID NO: 51 - protein, 264 aa, Brassica napus
MRMSCNGCRVLRKGCSDDCSIRPCLGWIKSPEAQANATVFLAKFYGRAGLMNLINAGPDHLRPGIFRSLLHEACGRIVNPIYGSVGLLWSGNWQLCQSAVEAVMKGEPITEMATDAATSGQGPPLKMYDIRHIAKDENSPAAAAAAGSTDRKRGKTRRAKRVAAVAKPAESGGGEASHHSSLSHQSEVVVAPHEGESKESESNNSEVMTFSPPAVQGSGEIKLDLTLGLEPVSRADHVVPVKKRKMGVFSTWQEESSCKTDPVL

SEQ ID NO: 52 - protein, 233 aa, Medicago truncatula
MSCNGCRVLRKGCSESCILRPCLQWIETPEAQGHATVFVAKFFGRAGLMSFISNVPEPQRPALFQSLLFEACGRTVNPVNGAVGLLWTGNWHVCQAAVETVLRGGTLRPLPELTLLDAPLTATDEASEAEDGGADAMWKIREPNFGLASSRSSNKVCSGSKRRRSEEFVKVPAAINLDLRLTPIFQQKAVEERRHGSPSMTSEESVTTTACLETGIGDRWSHGGDRKVLNLFI

SEQ ID NO: 53 - protein, 278 aa, Medicago truncatula
MRMSCNGCRVLRKGCSEDCSIRPCLEWIKCPQSQANATLFLAKFYGRAGLINLINSGSENLRPAIFRSLLYEACGRIVNPIYGSVGLLWSGSWHLCQAAVEAVLKGEPITPIDSEADENERGPPFKAYDIRHVSKDENLEETKQVRTRSRFRRAMKPKPSKEVGSGSGSSSAKEVDRSKSQESSLSQPGKDSESGVSVETSILFHDESEFEPESQAKVKGRAEGRAEEGLSDGVGLELRLGIEPVSREEFMVPIKKRKIVLKDCSASSKVELGLELSA

SEQ ID NO: 54 - protein, 247 aa, Arabidopsis thaliana
MSCNGCRVLRKGCSENCILRPCIQWIESPEAQGHATVFVAKFFGRAGLMSFISAVPESQCPALFQSLLYEACGRTVNPVNGAVGLLWTGNWNVCQAAVETVLRGGSLKPIPELLNGGGFAGFPSPTSDEASEICTEMLNLRKADDSGDRNIYHHCRFSSSRSRSRSTASPPKRKRLSSEQQPSSELDLSLIPIYPIKTLPFKEDTPSMYSEESVTTVSFQNNNAGDRYVRCGGGGGGATTKLLNLFA

SEQ ID NO: 55 - protein, 240 aa, Arabidopsis thaliana
MSCNGCRVLRKGCSETCILRPCLQWIESAESQGHATVFVAKFFGRAGLMSFISSVPELQRPALFQSLLFEACGRTVNPVNGAVGMLWTRNWHVCQAAVETVLRGGTLRPISDLLESPSLMISCDESSEIWHQDVSRNQTHHCRFSTSRSTTEMKDSLVNRKRLKSDSDLDLQVNHGLTLTAPAVPVPFLPPSSFCKVVKGDRPGSPSEESVTTSCWENGMRGDNKQKRNKGEKKLLNLFV

SEQ ID NO: 56 - protein, 233 aa, Arabidopsis thaliana
MRMSCNGCRVLRKGCSENCSIRPCLQWIKSAESQANATVFLAKFYGRAGLMNLLNTGPDHLRPAIFRSLLYEACGRIVNPIYGSVGLLWSGNWHLCQAAVEAVMRGSPVTPIACDAAVTGQAPPFNNKLCDIRHVSSRDENVKRRSRGACKEERNVRSLSHESSLSHESPVSSEETTTEEPKTWIGLELTLGLEPLARGNHVVVPMKKRKLERCGTSEDEDTCKIELGLVCSE

SEQ ID NO: 57 - protein, 263 aa, Arabidopsis thaliana
MRMSCNGCRVLRKGCSEDCSIRPCLAWIKSPEAQANATVFLAKFYGRAGLMNLINAGPNHLRPGIFRSLLHEACGRIVNPIYGSVGLLWSGNWQLCQDAVEAVMKGEPVKEIATDAATIGQGPPLKIYDIRHISKDDNSAAAATGSTDLKLAKTRRAKRVSTVAIQAESEGKSDEASHDSSLSHQSEIVAAHEGESKESESNVSEVLAFSPPAVKGSGEIKLDLTLRLEPVSRAYHVVPVKKRRIGVFGTCQKESTCKTELML

SEQ ID NO: 58 - protein, 233 aa, Arabidopsis thaliana
MRISCNGCRVLRKGCNQDCTIRPCLQWIKSADSQANATLFLAKFYGRAGLLNLIESGPDHLRPAIFRSLLYEACGRIVNPVDGSVGLMWSGNWAQCQAAVDAVLNGLPITHTPLPSASASHQIIPPHRTYDIRHVAKDPTTGGDSSENLATRVNANKSKTQTGRFKRESVNQLGECSHDMWQLPSSSATHGYGHFTLENVESRREAPFNQSSPNLGFDDQVDINEVGLELRLG

SEQ ID NO: 59 - DNA, 924 bp, Oryza sativa
atgcggatgagctgcaacgggtgccgcgtgctgcgcaaggggtgcagcgacaactgcgccatccgcccctgcctgcagtggattcgcagccccgatgcgcaggccaacgccaccgtcttcctcgccaagttctacggccgcgccggcctcatcaacctcatcaccgccggccccgagcacgtccgtcctgccatattccggtcgctgctgtacgaggcttgcgggcggatgctgaacccggtgtacggatccgtcggcctcctctggtcggggaactggcagctttgccagtccgccgtcgagtccgtcctccgcggcatgcccatcgcgcagccgccgccgtccgccaccgccgtgcccccgctccccacctgcgacatccgccacgtcggcgccaggagaggcgacgtccatggcgccgcggccggcccggttgccgacctccaccggcttgacatcagctcgcgcgccaagttcaagaggcccggcggcggcgccgccgccgcccacaggtccgaccatgccgccttcgagctcgtcttctccaagcccgccgccgccatggccgtcgatgtgataaggcaggcgcagccgctcaactgggcgcccggggcgctcagccacgagtcggcgagccacgacgccgcgccgccggagagcgagggccacagcaacgacacggccgacaccgtggacggctcccacgtcagccagtcggagccggagccgagagcgacgtcggcggcgaccgaggtgcacgacgccggcctagacctcacattaggtctaccgccgccgccgccgccggtgcaaaagaccgagccggcggacagcgacggcggcagccagcagcaacacgatcatcggaaggagaagccggtggagctcggcttggcgatctcaactaaagtagcagctcaatga

SEQ ID NO: 60 - DNA, 993 bp, Oryza sativa
atgcggatgagttgcaacggttgccgggtgctgcgcaagggatgcagcgaagggtgcaccatccgtccgtgcctgcagtggatcaagacccccgaggcgcaggccaacgccaccgtcttcctcgccaagttctacggccgcgccgggcttctcaacctgctcgctgccgggcctgaccacctccgccccgccgtcttccgctcgctcctctacgaggcctgcggccgcatcgtcaacccgatctacggctccgtcggcctgctctggtcgggccagtggcaggcgtgccaggccgccgtcgaggccgtcctcaagggcgaccccgtcgtgcaggtctcctctgaggccgccgccgccgcccaggccaccccgccgctcagggcctacgacatccgccacgtctccaaggacgccgaggccgacgccgccgccaacctgctccgcgtcgcgcgcggcggccgcacccgcttcaagcgcgcctcctccagctccaactccaagcacggcgccaagcttgccggagcagccgccgccaagcgcgccgcgtcccccagcagcagcagcccgacgcacgagacggagccggaggcggtggtcgtcgtcggtgaccatgacgacgaccaccaccaccctgcgctgagccacgaggtccacgaggagtcggctggcagccatgaccacgacgacgacgaccatgtggacgacggtgacaacaacgacatggccatcgccgacgtgacgccgccgcgggcgggatcggaggataccgaggtcgagaccggctcacacgtgagccaggccgagcagagccccgtgccggtggagcacgaagagggggaggaggaggaggtcgggctggagctcacgctcgggttccagccgctcgtcgtgcgcgcctcgaggaggccttcgtcggcggaggcgcgctgcgaccttagcggcttgagcgcggagtcgagtcgcatcggcctgcggctcgagctgccagcgtga

SEQ ID NO: 61 - DNA, 615 bp, Oryza sativa
atgagctgcaacggttgccgggtgctgcggaaggggtgcagtgacggctgcgtgctgcggccatgcctgcagtggatcgacgccgccgacgcgcagggccacgccaccgtcttcgtcgccaagttcttcggccgcgccggactcctctccttcatctccgctgtccccgaggcgcagcgacctgcgttgttccagtcgctgctgtacgaagcagcggggcgaaccatcaatccggtgcacggcgcggtgggcctcctctggacggggaactggcccctctgccaggccgctgtcgagaccgtgctgcgtggaggcgccatcggccctctgccggagctcggcggggcctgcggcggcgctggcggggacctctacggcgccgccaagcgcaacggcggctggtctaccttctccactgcgaagcgggtgaggaaggccgaggtacctgaagccccgtcgtgcgacctaggcctgtgcctcagccccggctctccgccggcggtgggggagaggaaaccagcactgcggccggggacgccgtcaatgagctccgatgagtccggcaccacaaccggaggcgaaagggatcctgtgctgctcaacctttttgtctga

SEQ ID NO: 62 - DNA, 699 bp, Oryza sativa
atgagctgcaacgggtgccgcgtgctgcggaaggggtgcagcgacgcgtgcgtgctgcggccgagcatcgagtggatcgacggcgcgcagccgcaggccaacgccaccgtcttcgtcgccaagttcttcggccgcgccggcctcgtcgcctccctcgccgccgtccctctccaccatcgtccagcgctgttccggtcgcttctgtacgaggcgtgcgggcggacgataaacccggtgagcggcgccatcgggctcatgtggacgggcaactgggacctctgccaggccgccgccgacgccgtcctccgcggcgactccctccgcgccctctcggccgtgccagccgccttcaccgaccgcgacatggccggcctctacggcaacgtcggcgccgccgccgggacctcctcctcctcgcccgacaacgacaactcctccgcctccgccgcgccccggaggaagcggcccaggaataacggcgccggcgccggcgtcggtcagcagcagctgccgcacgcggtggctgcggtgctccagtcctgcgagctggacctctgcctcacgcccgtctcaccgccggccgtgcagctggtgggtgggggcggcggcgcgtcggacgagcactcgacgacgacgtgcgaggaagccagcgacggggatggcgccggggcgcccacgctgctgaacctcttcagctga

SEQ ID NO: 63 - DNA, 681 bp, Oryza sativa
atgagctgcaacggctgccgcgtgctgcggaaggggtgcagcgaggggtgcgtgttgcggccgtgcctgcagtggatcgacggcgccgaggcgcagggccacgccaccgtgttcgtcgccaagttctttggccgcgccggcctcatgtccttcctcaccgccgtccccgagccgcagcgcgcagcggtgttccagtcgctgctgtacgaggcggcggggaggacgatcaacccggtgggcggcgcggtcgggctgctctccggcgggagctggcacctctgccaggcggcggtcgacaccgtgctgcgcggcggaggcatccaaccgctgccggaccaggtcgacgccgccgccgccggtggccgcgacgtgttcgcctccacggcgaggcgcgccatgggcgggtgctccacgttctcgacggcgaagcggtcgacgacgacgacgacgaccaagaaccccggtactccgcatgacgccgccgccgcggcgccccagccggaaccgtcgtgcgacctcggcctgtggctcagccccggctccccgccggcgcccggggaccggcgatccggcggcaggcgggccgacacgccgtcgatgaactccgagggatccgtcacgacgtgcggcgtcgtcggcgacggcgagagggagcccgagctgctgaatctttttgtctag

SEQ ID NO: 64 - DNA, 1036 bp, Oryza sativa
aaacattgaaacactttgtcccactctctctctttctctttcttgtaccaaaagctttttgaatctccaagattatagcaaaaccaaagataaaatactaacttaaaaagatttctgaaaataatgagttgcaatggttgtcgagttctacgaaaaggttgcagtgagaattgcatcctccgtccatgtattcaatggatcgaatcacctgaagctcaaggccacgccaccgtcttcgtcgctaagttcttcggccgtgccggtttaatgtctttcatctccgccgtaccggaatctcaatgccctgctttgtttcagtctttgctatacgaagcttgtgggagaactgtgaatccggtgaacggagccgtcggattgttgtggacggggaattggaatgtttgtcaagcggcggttgagacggtgcttcgtggtggttctttaaaaccaataccggagcttcttaacggcggtggattcgccgggtttccgtctcctacttccgacgaagcttcggagatctgtacggaaatgttgaatctacgaaaagctgatgattccggtgatcggaacatttatcatcactgccgattctcaagctctagatctagatcaagatcaacagcttctccgccgaaacggaaacgattatcgtcggaacaacaaccttcgtcggagcttgatctctctcttattcctatttatccgattaaaaccttgccgtttaaggaagatacaccgtcgatgtactcggaggagtctgttaccacggtttcgtttcaaaacaacaacgccggtgatcggtacgtacgctgcggcggaggaggaggaggagcaacgacaaagttgctcaatctcttcgcttgaacggcgtcgtttttgttatgagggttaaaaatgtaatttcgagtaactttttgttgtggccttttttggattaatagcccttaatattttgtgaaatgtagcaaattacgtgatttatttctctctttaattatgagaaattatccaaagtaatagagaataatgatat

SEQ ID NO: 65 - DNA, 996 bp, Oryza sativa
gttttttctttcccttcttcaatcaaaacctatttgcatgctctcaaacccgaattaaatcgacacttttcagtttttgttttaacaagtagagtttcccaaaatattggatatatttctttttcaaatttcggaaaagaaatgagttgcaatggatgtagagttcttcgaaaaggttgcagtgaaacatgcatccttcgtccttgccttcaatggatcgaatccgccgagtcacaaggccacgccaccgtcttcgtcgctaaattctttggtcgtgctggtctcatgtctttcatctcctccgtacctgaactccaacgtcctgctttgtttcagtcgttgttgtttgaagcgtgtgggagaacggtgaatccggttaacggagcggttggtatgttgtggaccaggaactggcacgtatgccaagcggcggttgagactgttcttcgcggcggaactttacgaccgatatcagatcttcttgaatctccgtcgttgatgatctcctgtgatgagtcttcagagatttggcatcaagacgtttcaagaaaccaaacccaccattgtcgcttctccacctccagatccacgacggagatgaaagactctctggttaaccgaaaacgattgaagtccgattcggatcttgatctccaagtgaaccacggtttaaccctaaccgctccggctgtaccggttccttttcttcctccgtcgtcgttttgtaaggtggttaagggtgatcgtccgggaagtccatcggaggaatctgtaacgacgtcgtgttgggaaaatgggatgagaggagataataaacaaaaaagaaacaaaggagagaaaaagttattgaacctttttgtttaaaaccgacgacgcaaaacactcaaagattttgaggctctcttttttagggttttgagtgggaatggatatttagttaatgatttttctctatcgagaaatatgataaaattttggggaaaaaaaaaaaaaaaa

SEQ ID NO: 66 - DNA, 804 bp, Oryza sativa
ctcaaacccaaaacacattttgttttttgtttcccatctaaaatgcgtatgagttgtaacggatgtcgagttctacgaaaaggctgcagtgaaaactgtagcataagaccttgtcttcaatggatcaaatccgctgaatctcaagccaacgccaccgtcttcctcgccaagttttatggccgtgcggggctcatgaacctcctcaacaccggtcctgaccacctccgtcctgcgatatttagatcattgttgtacgaagcatgcgggaggattgtgaatccgatatacggatccgtggggttattgtggtcaggaaactggcatctttgtcaagcggccgttgaggcagtaatgagaggctcacccgtgactccgatcgcatgcgacgcagcggttactggtcaagcacctccttttaacaacaagctttgcgacataagacacgtgtcaagcagggacgagaacgttaagagacggagccgtggtgcatgcaaggaagagagaaacgtgaggtctttgagtcatgagtcgtcactgagtcacgagtcaccggtgtcttctgaggagacgacgacggaggaaccaaagacttggatcgggcttgagctgactttggggttggagcctttagcacgtggaaatcacgtggtggtaccgatgaagaaaagaaagttagagaggtgtggcacgtctgaggatgaggacacgtgtaagattgagcttggactggtgtgcagtgagtgaatggttctttttttgtggctggtcttaattacaagttttggtgttgagttttaggtgtac

SEQ ID NO: 67 - DNA, 1217 bp, Oryza sativa
ctctctccgcttcccccaaaaatccaggggcttcttacacgcacacaatcctttaaagctatcgtctttcttatataatcagtgaatcttcattaacacctcccacaaaatctcagaaataactttcacaacagagtcaaagagttccaaatcgtttgtttgtattttgtacgatcaaagttgttggtacttgtaagataatcgaaaccaaagatgcggatgagctgtaatggatgcagagttcttcggaaagggtgtagtgaggattgtagtataaggccgtgtttggcttggatcaaatcgcctgaagcgcaagctaacgcaactgtctttctcgccaagttctatggccgtgctggactcatgaacctcatcaacgccggtcccaatcaccttcgtcctgggattttccgatcgttgttgcacgaagcttgtgggaggattgtgaatccgatctatggttcggtgggtttgttgtggtcggggaattggcagctttgtcaagacgccgtggaggctgtgatgaaaggagaaccggtcaaagagatcgccacagacgctgcgacgatcggccaaggtccgcctcttaagatctacgacatccgacatatctccaaggatgataactctgccgccgcggctactggctcaaccgatttgaaacttgcgaaaactcgccgtgctaagcgggtctccaccgtcgcgatacaggcggaatcggagggaaagtctgacgaggctagtcacgattcgtcgttgagtcatcagtctgaaatagtggctgctcatgaaggagagagcaaggaatccgagagcaatgtctctgaggttttggcattctcgcctccggctgtgaagggctccggcgagataaagcttgacctaactttaaggctcgaaccggtgtcacgtgcgtatcatgtggtacctgttaagaagagaaggatcggcgtgtttggcacgtgtcagaaggagagcacgtgtaagactgagcttatgctctaagctccgttttagctatactcagaagttttgcccccatcagctctattcggctcggctctgatgatcttcaagtcgagccggtaacttttttttaatatatagttctctatttccccctttaatgttcactttccatttgtgacaaaagaatagagtatatgtacaaaattatttacagagattaattcaagaattggctgagatattatcta

SEQ ID NO: 68 - DNA, 983 bp, Oryza sativa
caaaagttgaaaaataccagctcattcacttatgactcatgagtaacttcttccttataaattcaaattgttcacaacttccttgagttccatttccgaacacaaacacacatcatacgtatatttgtcactaataaacatataaaggaatatgagaatcagctgcaacgggtgtagggttctacgcaaaggttgcaaccaagattgcaccattcgaccatgccttcaatggatcaaatccgcagactctcaagccaatgctacactcttccttgctaagttctacggtcgagccggtcttcttaacctcatcgaatccggtcctgatcaccttcgtcccgcaatatttaggtcacttctgtacgaggcttgtggtcggatcgtgaaccctgtagatggttcggttggtttgatgtggtcagggaactgggctcagtgccaagcagctgttgacgccgtgctcaacggcttacccataactcacacacctcttccaagtgcatccgcgtcgcaccagatcattcctccccacaggacttacgatatacgccacgtggctaaagatccaacaaccggcggcgacagttcggagaatctggccacacgtgtaaacgctaacaagagcaagacgcaaactggccgattcaaacgtgaatccgtgaaccaactaggtgaatgtagtcatgacatgtggcaactcccaagttctagtgctacgcatggttatggccacttcacgttggagaatgtggagagccgaagggaagctccatttaatcaaagttctccaaatcttgggtttgatgatcaagtcgatatcaacgaggttggcttagagctcagacttggttagaaccagaagattgcattattattatcataattctgtctttttaattaataatttcactttctatataaaaggagaaaaaaaaactaaagcaaatcaaatttagtattattgtcaatcattaggttatcat

SEQ ID NO: 69 - DNA, 925 bp, Linum usitatissimum
gtctccaacccccaaacactcaaaaaattatagaaaattaccagccgccggaagcagaggtgatcggaggatgagctgcaacggttgcagagtactgaggaaaggatgtggagagaattgcgtgctgaggtcatccctccgatggattcccactcctcaagcacaaggcaacccactttgttcctcgccaaattcttcggccgcagcgacctcctctcctttatctcctccgtccccgatcctcaacgccccgctctgttccagtcgctgctatttgaagcgtgtgggaggacggtgaacccggttaacggggcggtggggctgctgtggagccgcaattggcacgtgtgtcaggctgcggtcgagaccgttctcgccggaggatcactgcatccgcttccgggaattgcggcaggggttgcgccgccgaatttcgacgagtcggatgacagctgctccgccgccggattcgctgctaatcagctccgcccggcgattttggcgattactggcgggaatcggaatctatcatcgtcctcctccacctcggagtatcgacgtcgtcataatgctgctctggtcggtggtgggaatgagaggaggattaataacagagatgcgagggcgtcgttttttgcggaggaatcggaaacgacgacattcgagagcaccggcggcgatcggaagaagctgctgaatctttttgtttgagtagagaggaggaaagaaaaaagagaagccgagtttttgtcggcaaaggaaagaacaagacttgaatgcggttactggaatgtgaactgtactttgggtttctgtgttttgtttcttatgaactttatatgataatatatatacataagagagagaaagaaagaacgccggaatgacagtccggcgagttttgggggaaaaaaaaaaaaaaaaa

SEQ ID NO: 70 - protein, 201 aa, Linum usitatissimum
MWRELRAEVIPPMDSHSSSTRQPTLFLAKFFGRSDLLSFISSVPDPQRPALFQSLLFEACGRTVNPVNGAVGLLWSRNWHVCQAAVETVLAGGSLHPLPGIAAGVAPPNFDESDDSCSAAGFAANQLRPAILAITGGNRNLSSSSSTSEYRRRHNAALVGGGNERRINNRDARASFFAEESETTTFESTGGDRKKLLNLFV

SEQ ID NO: 71 - DNA, 894 bp, Triticum aestivum
atgcggcttagctgcaacggctgccgcgtgctgcggaagggctgcagcgaggactgcagcatccgcccctgcctgcagtggatcaagagccccgaggcgcaggccaacgccaccgtcttcctcgccaagttctacggccgcgcggggctcatgaacctcatcaacgccggcacggacgacagcctccgccccggcatcttccgctcgctcctctacgaggcctgcggccggatcgtcaaccccatctacggctccgtcggcctgctctggtccaacaactggcagatgtgccaggccgccgtcgaggccgtcctcagcggcaagcccatcgtccaggtctcctccgaggatgccgccgccgaccggacaccgccgctcaaggcgtacgacatccgccacgtctccacctcgccagccgccgacgggaggctccacaaggtcgccaagccgggtcgcacccgcttcaagcgcgcgtcctccgcctcgtcccaccacaacccgtccagcgactccaacaacaagcccaagcccaagccgcagcctcagacgcgggcgcccacggcggaggaggagcgggatcgtcaacaccgcaaggagatggaggagggcgcgttccagcgtgctccgagccacgaatcctccgacagccgacacgaggaccccgtggagccacactgccagcaagaggcgtccgcggacacggaggccgaggcggggtcgcacgtcagccaggcagagcaggagcagagcacagagccggccgcagagcacgcggaggaggtcgaaaaggaggacgaagaactagggctcgagctcacgcttggattcgctcccgtcgcagcacggcctgccgaattcacctgaccgtccgaaccggggggagcggctttcgcg

SEQ ID NO: 72 - DNA, 1068 bp, Medicago truncatula
atgagttgcaatgggtgccgagttcttcgaaaaggttgcagtgagtcgtgtattttacgaccttgtttgcaatggatcgaaactccagaagctcaaggccacgctactgttttcgtagcaaaattctttggtcgggctggtctcatgtccttcatttccaacgtccctgaaccacagagaccagctctgtttcagtctctactgtttgaagcgtgtgggagaacggttaaccctgtgaacggtgctgttggacttctttggactggaaactggcacgtgtgtcaagcagcagttgagacggttcttcgcggtggcacgctaaggcctttaccggagctgacacttctggacgcgcctctcactgccaccgatgaagcttctgaggcggaagacggtggtgctgatgctatgtggaagatccgagaaccgaatttcgggttggcgagctcacgatctagcaataaggtgtgttctggaagcaaacggaggagatcggaggagtttgtcaaggttccggcggcgattaatcttgatttacgattgacgccgatttttcaacagaaggcggtggaggaacgccggcatggttcgccgtcgatgacgtcggaggaatcggtgacgacgacggcgtgtttggagactgggattggagatcggtggagtcacggtggtgatcggaaagttctcaaccttttcatatgaggattttctgtatttgtgttgagcgtgactctcacgcgccgtaaagtttttctgttttgctcacaatactcattgtggtgaaaagagtaaaacggttttgtagttcggtgaattttcgtgagttaccggttcaggatttctctagagagaaagatgatggttcgtcggtgatttttttctttttgctgctaaatatgagatgtgtaaacctgtaaccgtggaatatcaaatattaaatcaaattaaataaatagtttttttttttttaatcatcgctgtttgaaatttagtagtagttggataaacattcagttattatagttcaatttgaacttcatatattttaatcatataaactcaatatta

SEQ ID NO: 73 - DNA, 1257 bp, Arabidopsis thaliana
atgtcaggagctaccaccgcttcctccggagaccacaacaacctccgtctcccaactccgacgcttgacgccgaatcgcaaactctgctgcaatcgatttctgctgaagggggttacgcttatgctcgcatggcggtgttagcggtggccggtgaccaaagcgcggcggaggcggcgcgtgatatggcttgggagcaacttcactctggtccgtggcactcggttctccccgtttggcgcgacgcttactcaatggcttgtctccacgtagctaaaatccatttcgccgccggcgagtttggtgaggcgcttggtgcgcttgatatgggtcttatcatgggaggtatgcttctccgcaaggatcttcatgattctgttttgttggtctcctctgaagctcgtaagatgacgaagagtcttgaagaagcttctggagatttcaaaggtgagagattggtcccggaagttcccgtcgacgtcaatgaggtccttaagattctaccttgcaggtctttaacttgtaaaagagtagagaagaggtctggtttatctttggaggggtttctgcgtgattattatctgccaggtacaccagttgttataaccaattctatggctcattggccagccaggaccaagtggaatcacttggactacctcaatgctgttgctggtaaccgcaccgttcccgtggaggtggggaaaaactatttgtgttctgattggaagcaagagcttgtgacattttctaagttccttgaacggatgcggaccaataaatcgtctccaatggagcctacttatcttgcccagcatcctttgtttgatcagataaatgaactgagagatgatatatgtattcctgattactgttttgtcggtggtggggaactccaatcacttaatgcatggtttggcccggctgggacagttactccgttacaccatgatccacatcataatatacttgctcaggttgttggcaagaagtatataaggctttacccatccttcctgcaagacgaactttacccttactctgagacaatgctctgcaactctagtcaggttgatctagacaatatcgacgaaaccgagttcccaaaggccatggagttggagtttatggattgtattctagaagaaggtgaaatgttgtacatccctcccaaatggtggcactatgtcaggtccttaacaatgagtctctcggttagcttctggtggagcaatgaagcagaatcttctagctcgtag

SEQ ID NO: 74 - protein, 418 aa, Arabidopsis thaliana
MSGATTASSGDHNNLRLPTPTLDAESQTLLQSISAEGGYAYARMAVLAVAGDQSAAEAARDMAWEQLHSGPWHSVLPVWRDAYSMACLHVAKIHFAAGEFGEALGALDMGLIMGGMLLRKDLHDSVLLVSSEARKMTKSLEEASGDFKGERLVPEVPVDVNEVLKILPCRSLTCKRVEKRSGLSLEGFLRDYYLPGTPVVITNSMAHWPARTKWNHLDYLNAVAGNRTVPVEVGKNYLCSDWKQELVTFSKFLERMRTNKSSPMEPTYLAQHPLFDQINELRDDICIPDYCFVGGGELQSLNAWFGPAGTVTPLHHDPHHNILAQVVGKKYIRLYPSFLQDELYPYSETMLCNSSQVDLDNIDETEFPKAMELEFMDCILEEGEMLYIPPKWWHYVRSLTMSLSVSFWWSNEAESSSS

SEQ ID NO: 75 - DNA, 2194 bp, Oryza sativa; identical to SEQ ID NO: 10

SEQ ID NO: 76 - DNA, 54 bp, Artificial sequence
  primer 1
ggggacaagtttgtacaaaaaagcaggcttaaacaatgtcaggagctaccaccg

SEQ ID NO: 77 - DNA, 50 bp, Artificial sequence
  primer 2
ggggaccactttgtacaagaaagctgggtaaaataaatccattcgctacg

SEQ ID NO: 78 - protein, 152 aa, Artificial sequence
  JMJ-C domain of SEQ ID NO: 02
TYLAQHPLFDQINELRDDICIPDYCFVGGGELQSLNAWFGPAGTVTPLHHDPHHNILAQVVGKKYIRLYPSFLQDELYPYSETMLCNSSQVDLDNIDETEFPKAMELEFMDCILEEGEMLYIPPKWWHYVRSLTMSLSVSFWWSNEAESSSS

SEQ ID NO: 79 - protein, 32 aa, Artificial sequence
  conserved box in JMJ-C domain of SEQ ID NO: 02
CILEEGEMLYIPPKWWHYVRSLTMSLSVSFWW

SEQ ID NO: 80 - protein, 23 aa, Artificial sequence
  DUF335 domain
RKMTKSLEEASGDFKGERLVPEV

SEQ ID NO: 81 - protein, 17 aa, Artificial sequence
  conserved motif
  UNSURE (11)..(11): Xaa can be any naturally occurring amino acid
ALDMGLIMGGXLLRKDL

SEQ ID NO: 82 - protein, 3 aa, Artificial sequence
  FE(II) binding consensus seq
  UNSURE (2)..(2): Xaa can be any naturally occurring amino acid
  VARIANT (3)..(3): /replace = "Val"
HXD

SEQ ID NO: 83 - DNA, 1290 bp, Arabidopsis thaliana
atgtcaggagctaccaccgcttcctccggagaccacaacaacctccgtctcccaactccgacgcttgacgccgaatcgcaaactctgctgcaatcgatttctgctgaagggggttacgcttatgctcgcatggcggtgttagcggtggccggtgaccaaagcgcggcggaggcggcgcgtgatatggcttgggagcaacttcactctggtccgtggcactcggttctccccgtttggcgcgacgcttactcaatggcttgtctccacgtagctaaaatccatttcgccgccggcgagtttggtgaggcgcttggtgcgcttgatatgggtcttatcatgggaggtatgcttctccgcaaggatcttcatgattctgttttgttggtctcctctgaagctcgtaagatgacgaagagtcttgaagaagcttctggagatttcaaaggtgagagattggtcccggaagttcccgtcgacgtcaatgaggtgagacatgttttggctaatctacaattacttgtccttaagattctaccttgcaggtctttaacttgtaaaagagtagagaagaggtctggtttatctttggaggggtttctgcgtgattattatctgccaggtacaccagttgttataaccaattctatggctcattggccagccaggaccaagtggaatcacttggactacctcaatgctgttgctggtaaccgcaccgttcccgtggaggtggggaaaaactatttgtgttctgattggaagcaagagcttgtgacattttctaagttccttgaacggatgcggaccaataaatcgtctccaatggagcctacttatcttgcccagcatcctttgtttgatcagataaatgaactgagagatgatatatgtattcctgattactgttttgtcggtggtggggaactccaatcacttaatgcatggtttggcccggctgggacagttactccgttacaccatgatccacatcataatatacttgctcaggttgttggcaagaagtatataaggctttacccatccttcctgcaagacgaactttacccttactctgagacaatgctctgcaactctagtcaggttgatctagacaatatcgacgaaaccgagttcccaaaggccatggagttggagtttatggattgtattctagaagaaggtgaaatgttgtacatccctcccaaatggtggcactatgtcaggtccttaacaatgagtctctcggttagcttctggtggagcaatgaagcagaatcttctagctcgtag

SEQ ID NO: 84 - protein, 429 aa, Arabidopsis thaliana
MSGATTASSGDHNNLRLPTPTLDAESQTLLQSISAEGGYAYARMAVLAVAGDQSAAEAARDMAWEQLHSGPWHSVLPVWRDAYSMACLHVAKIHFAAGEFGEALGALDMGLIMGGMLLRKDLHDSVLLVSSEARKMTKSLEEASGDFKGERLVPEVPVDVNEVRHVLANLQLLVLKILPCRSLTCKRVEKRSGLSLEGFLRDYYLPGTPVVITNSMAHWPARTKWNHLDYLNAVAGNRTVPVEVGKNYLCSDWKQELVTFSKFLERMRTNKSSPMEPTYLAQHPLFDQINELRDDICIPDYCFVGGGELQSLNAWFGPAGTVTPLHHDPHHNILAQVVGKKYIRLYPSFLQDELYPYSETMLCNSSQVDLDNIDETEFPKAMELEFMDCILEEGEMLYIPPKWWHYVRSLTMSLSVSFWWSNEAESSSS

SEQ ID NO: 85 - DNA, 1518 bp, Arabidopsis thaliana
atgccgacgggatgcgagtttccgatgatcaaaaccttcgagaatgctcttactgccgccgacttcgagtctaccgtcgagctcaccaacttcccagcagtttttcggggatgtgctagtgtctgggatgcgtattctaagtggaatccattcaacagtggcctcgattatctggaggaacgtgcaggttcagttgaagtggaggcaatgctttcgaggacggctccagttttcaatggtgatatcagaagccatgagagggtgtcattgcctttctcggattttatcagattctgcaagcagcatatgagaggcaaagggaatggttctggtgttgatgctaagtctgcagatttaaatcctatgtgtgaggactatagacctggacaaatatacctagcacagtttccaattctgaatgatgagaaagaagagaaggttctacttaagattctgagacaagatatccagacgcccacatttttagacgcaaagtcactttcttctatcaacttttggatgaattctgcagaagctcgatcaagtacccactatgatccacatcataaccttctatgcgtagtctcagggcgtaaaaaagttgtattgtggcccccttccgccagtccctcgctctacccgatgcctatatacggagaagcatcaaaccatagttcggttggtctagaaaatccaaatttatcagattatccaagagcagagcattcactgaagcagtcacaggagattactcttaacgctggtgatgcagtattcattcctgaaggttggttccatcaggtggatagtgatgaactgactgttgctgtcaacttttggtggcaatcaaactatatgtctaacatgcctgaacacatggattcgtattatctgcgtcgaatcacaagaagattgatagacagagaaatgagcctgttagtctcgaagccttcttcaactgatttaaggcacctgtctgagcatattgaccaatctcgcattgagatggcagaaggtgggaatgataatataggcaatgaaagcattaaaaagggcctcagcacattgcatgaaaaagcgtcgctgcacgatctagatccttctgcttcccaggcgcttcatgatcttatttctttagtccatgaccacgttaatgctgttgatacaaaagatgatcgcgttgcccatttgctttggaatcttgaagcctctagacttcgggatgttctccttgcaatggcacgttatttcccaagaactttagaagcattaatactccacatgctctcacccattgctgcggaagttctaacacagaagtttgatgagattgaccaacagactggtgaagaagataggacccagttctttcgggaattttatagtgcattcgatgatgaagcagctgcgatggatataattttaagtaggaaagaggcttttgcatttcaggcatttaagaatgtactagacaagtttttgggggtcaacattgcttcaccaacaacaaacatttga

SEQ ID NO: 86 - protein, 505 aa, Arabidopsis thaliana
MPTGCEFPMIKTFENALTAADFESTVELTNFPAVFRGCASVWDAYSKWNPFNSGLDYLEERAGSVEVEAMLSRTAPVFNGDIRSHERVSLPFSDFIRFCKQHMRGKGNGSGVDAKSADLNPMCEDYRPGQIYLAQFPILNDEKEEKVLLKILRQDIQTPTFLDAKSLSSINFWMNSAEARSSTHYDPHHNLLCVVSGRKKVVLWPPSASPSLYPMPIYGEASNHSSVGLENPNLSDYPRAEHSLKQSQEITLNAGDAVFIPEGWFHQVDSDELTVAVNFWWQSNYMSNMPEHMDSYYLRRITRRLIDREMSLLVSKPSSTDLRHLSEHIDQSRIEMAEGGNDNIGNESIKKGLSTLHEKASLHDLDPSASQALHDLISLVHDHVNAVDTKDDRVAHLLWNLEASRLRDVLLAMARYFPRTLEALILHMLSPIAAEVLTQKFDEIDQQTGEEDRTQFFREFYSAFDDEAAAMDIILSRKEAFAFQAFKNVLDKFLGVNIASPTTNI

SEQ ID NO: 87 - DNA, 1038 bp, Arabidopsis thaliana
atggctaaagagatagagaatttatggagagaagtgagagaattgagcttaggaactaaaatcgatcgttttgattctcaaccgtctccggtgaagtttctccgaaactacgtgtctcagagcaagccttgtgtaatctccaaagctattactcattggccggcgttaaaactctggtcagatccggcttacctcaccggagctttgtcagatgacgttgtctcgctacatctcactcctaacggctgcgcagacgccgtcaccggagatagtgatctttgtttcgcttcggctcatgttgagaaagttctgttcccggaggctcttaaggttgttcaatcgtcgtgtaaaggactgaaggttgggtatttgcaacagcaaaacgattgttttagaacggagtattcgacggttgcgttagactgcgacggtgatattgagtgggctacggaggcatttggttgttcgccggaagctgtgaacctttggattggtactgatgactccgtgacttcatttcataaagatcactatgagaatctttacgctgttgtttcaggggagaaacatttccttcttcttcctccgactgatgttcaccgtctctatatcgaacagtatccggcagctaattactcttaccaccgagatactgatgcgttcaagcttgaggttgaggagccggttaggcatgtaccttggtctagtgttgatccatacccttcgccagagaaggaagcaagcgagagattgaaatttccgttgttctttgatggcccgaagccgtttcattgtactgtcaaggctggcgaggttctttacctgccaagcatgtggtttcaccatgttagtcaaaccccaggagatggaggttataccattgcagtgaactattggtatgacatgcagtttgacatcaagtatgcttattttaacttcttgcaatctttattatacaagtcatcttcactcaatccagttctttcttggagagaagacgaagattcagaatccagtgatgcagagattgctccctga

SEQ ID NO: 88 - protein, 431 aa, Arabidopsis thaliana
MAKEIENLWREVRELSLGTKIDRFDSQPSPVKFLRNYVSQSKPCVISKAITHWPALKLWSDPAYLTGALSDDVVSLHLTPNGCADAVTGDSDLCFASAHVEKVLFPEALKVVQSSCKGLKVGYLQQQNDCFRTEYSTVALDCDGDIEWATEAFGCSPEAVNLWIGTDDSVTSFHKDHYENLYAVVSGEKHFLLLPPTDVHRLYIEQYPAANYSYHRDTDAFKLEVEEPVRHVPWSSVDPYPSPEKEASERLKFPLFFDGPKPFHCTVKAGEVLYLPSMWFHHVSQTPGDGGYTIAVNYWYDMQFDIKYAYFNFLQSLLYKSSSLNPVLSWREDEDSESSDAEGSKFTPSATNLYLSSTYVSDGARFWKRVHVNSIKLGFESNGLIQSGLIDMYRKYRLVINAEKVFRAMEGQTVLTVGGYGFEYYAEWFSH

SEQ ID NO: 89 - DNA, 1142 bp, Medicago truncatula
atgaatgagaagatagaagaactatggagagaagtacgagaattaagtctaggaagcaaaagaagcatagaacgtttagaatcagcaccaacaccactccaattccatagaaacttcatcactccaaacaaaccttgcatcatctccaactccatctcccattggccctccctctctctctggtcccacccttcttacctcactcaatccctctcttccaccaccgtctccctccatctcacccccaccggctccgccgactctttaacccctctcccctcttccccctcctccctctgcttcgcctctgcccatgtccaaaacctccctttccccgaagccctccgtctcatcaactcctctaacccttcccaatgtgtcgcctacgcgcagcaacagaacgattgttttcgttcagagtatgattccattgttaaagattgtgatcaacatattgcttgggctactgaagcatttggtttagagcctgaagctgttaatctttggattggaaacaaacattcatctacttggtttcataaggatcattatgagaatctttatgctgttgttactggtcaaaaacactttcttttgtttcctcctactgatgttcatcgcttttatattcggaattaccctgctgctacttataaatattacatggaaactggagagtttgatttggaacttgacaagccaactaggtatgtgccttggtgtagtgtgaacccttttccttctccggagaacttggaggacgagatttcaaagtttcctttatacttcaatggccctccaccgtttgagtgtactgtcaaggctggggagattctttacttgtatgattctcttcttttgcattgcatcatgccaagcatgtggtttcatcatgttagacaaagtggggatgatggagaattaactattgcagtaaattattggtatgatatgcaatttgacattaagtatgcttatttcaactttttacaatctattgattaccgatctcctacgagtccaatgatgcctgagaaattgtgtgaggagatagattttggtcctgatgacgatgagactagatgaattatcatttctcagtcggtgatattcggcaatgtggtccttcgatcgaatgctga

SEQ ID NO: 90 - protein, 361 aa, Medicago truncatula
MNEKIEELWREVRELSLGSKRSIERLESAPTPLQFHRNFITPNKPCIISNSISHWPSLSLWSHPSYLTQSLSSTTVSLHLTPTGSADSLTPLPSSPSSLCFASAHVQNLPFPEALRLINSSNPSQCVAYAQQQNDCFRSEYDSIVKDCDQHIAWATEAFGLEPEAVNLWIGNKHSSTWFHKDHYENLYAVVTGQKHFLLFPPTDVHRFYIRNYPAATYKYYMETGEFDLELDKPTRYVPWCSVNPFPSPENLEDEISKFPLYFNGPPPFECTVKAGEILYLYDSLLLHCIMPSMWFHHVRQSGDDGELTIAVNYWYDMQFDIKYAYFNFLQSIDYRSPTSPMMPEKLCEEIDFGPDDDETR

SEQ ID NO: 91 - DNA, 1071 bp, Brachypodium sylvaticum
tcaatcgttcttctcctcaagatcaccttccaaggcagcatctttgttgtccagcggagaattactgatctccagtgacctcaggaagttaaagtacgcatacttgatgtcaaactgcatgtcataccagtaattcacagcaatggtgagcccgttaggcccggggctctggctgacatggtgaaaccacatgctcggcaagtagagcacctcgccagcacggacggtgcaccgtatcggcctgggcccctcgaagtagagcgggaaggatgagacctgcgccgccatctcctccggcgacgacgggttcgggtccacgctgctccacggcacgatcctctcgggctcttccatctccagcttaagccccgtcagctcctcctctccttcgttctccgtgacgtagcgggcggcggggtagtcgcggacgtagaggcggtggtgctcggtggggggcaagaggaggaaatgcttctcgccggagaggacggcgtagacgttgtcgtagtggtccttgtggaaggaggtgacggagcaggagttgccgatccagaggttgacggcctccgggaggcagccgagcgcctcgctggcccagggcacgtgcgcgtccacgtcgccggccaccgccgcgtactccccgcgcaggcagtcgtcctgctgctgcgcgtacgccaccaggccgccagcggccgcccggtcggagcccctgatgagccgcacggcggtagggaagtcgacccggcggacgtgcgcggacgcgaagcacctggcgccggggaggcacgggtgaggggcgagggcgtcggcgcggccgtcgggggtgaggtggacggagacgtcggtggagcggagcgcgtcggtgaggtaggattcggtgggccagagggaggcggcgggccagtggcgggtggcggcggcggagacgaggagcgggcggcccggggagacgtggtcgcggaggaaggcgagcggggtcgggggcaggtcggcgcgcggcacggcctccggagagtggagacccagcaggtcccgtgattccgcccacagctcccgcaccgcgcgctccat

SEQ ID NO: 92 - protein, 356 aa, Brachypodium sylvaticum
MERAVRELWAESRDLLGLHSPEAVPRADLPPTPLAFLRDHVSPGRPLLVSAAATRHWPAASLWPTESYLTDALRSTDVSVHLTPDGRADALAPHPCLPGARCFASAHVRRVDFPTAVRLIRGSDRAAAGGLVAYAQQQDDCLRGEYAAVAGDVDAHVPWASEALGCLPEAVNLWIGNSCSVTSFHKDHYDNVYAVLSGEKHFLLLPPTEHHRLYVRDYPAARYVTENEGEEELTGLKLEMEEPERIVPWSSVDPNPSSPEEMAAQVSSFPLYFEGPRPIRCTVRAGEVLYLPSMWFHHVSQSPGPNGLTIAVNYWYDMQFDIKYAYFNFLRSLEISNSPLDNKDAALEGDLEEKND

SEQ ID NO: 93 - DNA, 1080 bp, Oryza sativa
atggagcgcgcagtgcgggagctgtgggcggagtcgcgggacctgctgggcctccactccccggacgacgccgccgccgccgacgccgcgatgccccgcgccgagatgcccccgacgccgctcgcgtttctccgcgaccacgtctcgccggggcgccctctcctcgtgtcctccgccgccaccagccactggccggccgcctcgctgtggccgaccgactcctacctcaccgacgcgctccgctccaccgccgtctcgctccacctcacccccgacggccgcgccgacgccctcgccccgcacccgcgcccgagccaccccggcgccaagtgcttcgcctccgcgcacgtccgccaggtcgacttccccaccgccgtgcgcctcatccggagctccgatccggcctccggcctggtggcctacgcgcagcagcaggacgactgcctgcgcggggagtacgccgccgtcgccggcgacgtggacgcgcacgtgccctgggccagcgacgcgctcggctgcctccccgaggccgtcaacctctggatcggcagcgcctgctcccagacctccttccacaaggaccactacgacaacatctacgtcgtcgtctccggcgagaagcacttcctcctcttgccccccaccgagcaccaccgcctctacgtccgcgactaccccgccgcccactacgccgcggaagatgaagcggagctgaggcttaagctggagctggaggagcccgagaggatcgtgccatggagcagcgttgacccctacccgccgtcgccggaggaggcggccgcgcaggcgtcatccttcccgctctacttcgaggggccgaggccgatccgctgcacggtgcgcgccggcgagatgctctacttgccgagcatgtggtttcaccatgtgagccagagccccgggccgaacgggctcaccattgcagtgaactactggtatgacatgcagtttgacattaagtatgcctacttcaacttcttgaggtcattggagatcgatggtagttcgtcgaaaaagacggatgctttggaagacgatctcgaggagacgaatgattga

SEQ ID NO: 94 - protein, 354 aa, Oryza sativa
MERAVRELWAESRDLLGLHSPDDAAAADAAMPRAEMPPTPLAFLRDHVSPGRPLLVSSAATSHWPAASLWPTDSYLTDALRSTAVSLHLTPDGRADALAPHPRPSHPGAKCFASAHVRQVDFPTAVRLIRSSDPASGLVAYAQQQDDCLRGEYAAVAGDVDAHVPWASDALGCLPEAVNLWIGSACSQTSFHKDHYDNIYVVVSGEKHFLLLPPTEHHRLYVRDYPAAHYAAEDEAELRLKLELEEPERIVPWSSVDPYPPSPEEAAAQASSFPLYFEGPRPIRCTVRAGEMLYLPSMWFHHVSQSPGPNGLTIAVNYWYDMQFDIKYAYFNFLRSLEIDGSSSKKTDALEDDL

SEQ ID NO: 95 - DNA, 3552 bp, Arabidopsis thaliana
atggggacagagctaatgagaatctgtgtgaaagaagatagtgatgatttgccatctgttcctcctggttttgaatcatatgcaacttttaccttaaaaagagtagtccctgctactacttctgataaagccaagactcctgcaattgaaagtgtttctgcaaccgaacaagctaagatggaagttgaatctgatgaagccaaagctgctcgggctctacgccgtagaccttggattaatcatagcggatgtgatgatgatggtgattgtgctgcaaacaatgacaatgctgcatctcaaaatcctgatcaaaattgtgatgtgaagccagctcttccaaagggtgtggtcaggggatgtgaagaatgtaaagattgtcagaaggagtttgaagacactttaaattatatcgctaaaataagaccggaggctgaaaagtatggaatctgtcgcattgttcctcctccttcctggaaaccgccgtgcccactgaaagaaaagcaagtatgggagggttctaaatttacaacacgtgtccaaagagttgataaacttcagaatcggagttcaatgaagaagatttcaaagcttcctaatcaaatgagaaagaagaaaagaaagtgcatgaaaatgggaatggattctgtcactaatggtatgggcgatccctgttctgcaagcactggaatgaatgaacttgagacgtttgggtttgaacctggtccagggttcacactaaaagacttccaaaaatatgctgatgagttcaaggctcagtactttaaaaagagtgaaacttctacagacgataaatgtaaagttgataattcaatagactgctgggagccagcacttgaggatgttgaaggtgaatattggcggatagtagataaagcaactgaagagatagaggtgctatatggtgctgaccttgaaactggggtatttggtagcggattccccaagatatcatcaagtcacaatgcttcttcttcagaagataaatatgcaaaatcaggctggaacttaaataactttccaaggcttccgggatccctccttaagtacgagggcagtgatatttccggtgtccttgtgccgtggctgtatattgggatgtgcttttcttctttctgctggcatgttgaagatcaccacttgtattcgttgaattatatgcactggggtgcaccgaaattgtggtatggtgttggggggaaggatgctgttaaactcgaggaggcaatgaggaagcatttgcctgacctttttgaagaacagcctgacttacttcataagctagttacacaactctccccgtcaaaactgaaaaccgcaggagtacctgtgcaccgttgcgtccagcatgctggagagtttgtcttgacttttcctcgggcatatcatgctggatttaattctggtttcaactgtgctgaagctgtgaatgtagcacccgttgactggttacctcatgggcagattgccatagagttatactgtcaacagggtagaaaaacgtccatctcgcatgataaattgttgcttggggcagcaagggaagtagtgaaagccgactgggagctgaacttactaaggaaaaatactgtagataacttaaggtggaaagcattcagtgcgaaggatggaattttggcaaaaacattaaaggcacgcattgacatggaacgtacgagaagagaatttctgtgcaactcttcacttgcattgaaaatgcacagtaatttcgatgctaccaacgagagagagtgctgtatatgcttctttgatttgcacctgtctgctgctggctgtcgttgttccccggagaagtattcatgtttgactcatgtgaaggagttgtgttcatgtccatgggttactaaatattttctatttcgctatgatatcgatgaactgaatgttcttgttgaggcagtggaaggaaaactgagttctgtatatagatgggcgcgtcaagatttaggattggcattaagtacagacgtctcaggaagcaagatggagatagatgaagaaggaaaagtccacaaggacccgactccacaaacaactgcactttcagggaaggatttgcagttgaaagtaacatcgaaagaagtaagtaaagagttagaaaagactagtaaattatctcatgttaatttacttctgaaagaaaaggaggagcaaataacgtcaagtcactgtatgaagcctgtcaaagaagaaactgtttgtgattcttctgatccaaacgtttcagcttgccaaccatctgaaggaggcataatctgtatgacagctgttaagtccgcaagtggtaaaaagaattcacagagtctacccaatgatgtgatactcctcagcgatgatgagtatgacatacctaggaaacgaggttctgtgagaagagatgcaatttcttctggcaagaaattagaaatacgagagagaccgacccacgttttggcgttagaagcttctgccaaaattgctgctccaatttgccaaagggaaggagattcgctgcgtgatacacgaaacactatatcattgcctactaatgaccaaaaaacaatgagaagggatgtaccgagttctacttcgcacgcggaagttaatgcggaggctactgggcttactcaagatatatgtaacagaatggcaactaacagccacggtggtggaaaacctactagttgtaaatccaaaaactctggaggtttggctatagtggatgttgtggatgggacaagaagtagttcaggtacaccgtcttgttcgcaaaataatagtccggataggttcatccgccaaaagggtccccgcattgcaaaggtcgtgaggagaatcaattgcaatgtagagcctttaagttatggatgtgtgctgtctggaaaatcatggtgcagccggcgagcaatttttcctaaaggatttcgtagccgggttaagtacataaacattttggatccaacaaatatgtgcttctacatttcagaaattctggatgctggacgcaacagtccattgttcatggtttacttggagagtaatcccagtgaggtgttcgttcatatgtcgcctacaagatgctgggagatggtaagagagagagtaaatcaagagataactaagcagcacaaagctggaaaatcagatcttcctcctttgcaaccctctgggagtcccgacggttttgaaatgtttggatattcgtcacccgcaatcgtacaggctatcgaagcattagacgtgaatcgagtttgcacagactattgggattccaggccttattcccggccacaagttcagttccctgcaaatcctcttctcagagaagccaacacaagtggcagatcgaatgtgggaaatctccagctaaaccctggacaccatatatcgcctactggaataaattctattcttaaagttctgttcaagaaagctagcatggaggaactaagctcacttcaagaggttttaagtgagactaactcagatatggtgaccgaacttgtgaaggaagagatccagaaccgtcgctga

SEQ ID NO: 96 - protein, 1183 aa, Arabidopsis thaliana
MGTELMRICVKEDSDDLPSVPPGFESYATFTLKRVVPATTSDKAKTPAIESVSATEQAKMEVESDEAKAARALRRRPWINHSGCDDDGDCAANNDNAASQNPDQNCDVKPALPKGVVRGCEECKDCQKEFEDTLNYIAKIRPEAEKYGICRIVPPPSWKPPCPLKEKQVWEGSKFTTRVQRVDKLQNRSSMKKISKLPNQMRKKKRKCMKMGMDSVTNGMGDPCSASTGMNELETFGFEPGPGFTLKDFQKYADEFKAQYFKKSETSTDDKCKVDNSIDCWEPALEDVEGEYWRIVDKATEEIEVLYGADLETGVFGSGFPKISSSHNASSSEDKYAKSGWNLNNFPRLPGSLLKYEGSDISGVLVPWLYIGMCFSSFCWHVEDHHLYSLNYMHWGAPKLWYGVGGKDAVKLEEAMRKHLPDLFEEQPDLLHKLVTQLSPSKLKTAGVPVHRCVQHAGEFVLTFPRAYHAGFNSGFNCAEAVNVAPVDWLPHGQIAIELYCQQGRKTSISHDKLLLGAAREVVKADWELNLLRKNTVDNLRWKAFSAKDGILAKTLKARIDMERTRREFLCNSSLALKMHSNFDATNERECCICFFDLHLSAAGCRCSPEKYSCLTHVKELCSCPWVTKYFLFRYDIDELNVLVEAVEGKLSSVYRWARQDLGLALSTDVSGSKMEIDEEGKVHKDPTPQTTALSGKDLQLKVTSKEVSKELEKTSKLSHVNLLLKEKEEQITSSHCMKPVKEETVCDSSDPNVSACQPSEGGIICMTAVKSASGKKNSQSLPNDVILLSDDEYDIPRKRGSVRRDAISSGKKLEIRERPTHVLALEASAKIAAPICQREGDSLRDTRNTISLPTNDQKTMRRDVPSSTSHAEVNAEATGLTQDICNRMATNSHGGGKPTSCKSKNSGGLAIVDVVDGTRSSSGTPSCSQNNSPDRFIRQKGPRIAKVVRRINCNVEPLSYGCVLSGKSWCSRRAIFPKGFRSRVKYINILDPTNMCFYISEILDAGRNSPLFMVYLESNPSEVFVHMSPTRCWEMVRERVNQEITKQHKAGKSDLPPLQPSGSPDGFEMFGYSSPAIVQAIEALDVNRVCTDYWDSRPYSRPQVQFPANPLLREANTSGRSNVGNLQLNPGHHISPTGINSILKVLFKKASMEELSSLQEVLSETNSDMVTELVKEEIQNRR

SEQ ID NO: 97 - DNA, 2793 bp, Arabidopsis thaliana
atgaatgctaatgagcaaactcgatccgccaatggcattggcaatggcaatggtgagtctattcccgggattccagatgacttacggtgcaagagatcggatggtaaacagtggagatgcactgcaatgtccatggctgataagactgtttgtgagaagcactacatccaagcaaagaagcgggcggctaattctgctttcagggcgaaccagaagaaagcgaaaaggcgatcatcgttaggcgaaacagatacgtattcggaagggaagatggatgatttcgagttaccagtcaccagcattgaccactataataacggtcttgcctctgcttccaagagtaatggtagactagagaagagacataataaaagcctgatgcggtactcgcccgagacaccgatgatgaggagtttctctccacgtgttgcagtggatttgaatgatgacttgggtagagatgttgtaatgtttgaagagggctacagatcttataggacaccaccatctgttgctgttatggatccgacacgaaacagatcacaccaaagcaccagtcctatggaatactcagcagcaagcacagatgtgtctgcagagtctttgggggaaatctgccatcaatgccagagaaaagatagagagagaatcatttcttgcctcaaatgcaatcaaagagccttctgccacaattgtctatcggcaaggtactcggagatatcacttgaagaagtcgagaaagtttgccctgcatgtcgtggcttgtgtgattgcaaatcttgcctgcgttcagataatacaataaaggttcggatccgggaaatacccgttttggacaagttgcagtatctttatcgtctattatcagctgtcctaccagtcataaagcagatccatcttgaacaatgtatggaagttgaactagagaagaggcttcgtgaagttgagattgatcttgtcagggcaagattgaaagcagatgagcagatgtgctgcaacgtgtgtcggataccagttgttgactactaccgtcactgtccgaactgctcatatgacctttgcctgagatgctgtcaagatctacgggaagagtcttcagtgacgattagtgggactaaccaaaacgtacaagatagaaaaggagctcccaaactaaaactaaacttttcatacaagtttcctgagtgggaagccaacggtgatgggagcatcccttgccctcctaaggagtatggaggctgcggttcacattctttgaatcttgcccgcattttcaagatgaattgggttgcaaagcttgtgaaaaatgctgaggagattgttagtggctgcaaattatctgatcttctgaaccctgatatgtgtgattcaagattctgcaaatttgctgagagagaagagagcggtgacaactacgtgtacagcccgtcgcttgaaacgattaaaactgatggagtagctaagtttgagcaacaatgggcagagggtcggcttgttactgtgaaaatggtacttgatgactcatcttgctctagatgggatcctgagactatttggagggatatagacgagctttcggacgagaaactgagagaacatgatccattcttgaaggccattaattgcttggatggtttagaggttgatgtaagacttggggagtttacaagagcatataaagatggaaagaaccaagagacaggtcttccgctattgtggaagttaaaggactggccgagcccaagtgcttccgaggagttcattttctaccaaagacctgagtttatcagaagttttccgtttctcgagtacattcatccccggttaggccttctgaatgttgcagccaagttacctcattactcgctccaaaacgattcaggtccaaagatttatgtgtcttgtgggacgtaccaagaaatcagtgctggcgattcattgactggtattcactacaacatgcgtgacatggtatacctattggtgcacacgtctgaagaaacaacattcgaaagggtgagaaaaacaaaacctgttccagaggaacctgaccagaagatgagcgaaaatgagtcacttcttagccctgagcagaaattaagggacggagagttacatgatctatcacttggtgaagccagtatggagaagaatgaacctgagttggcgttgactgtgaatccagagaacttaacggaaaacggtgacaacatggaatcttcttgcacatcttcatgtgcaggaggagcccagtgggatgtctttcgacgccaagacgtcccaaagttgtccgggtatttgcagagaacattccagaagcctgataatatccagactgattttgtgtcacgcccgttgtatgaaggattgttcttaaatgaacaccacaagagacaactaagagacgagtttggagttgagccatggacatttgagcaacatcgtggtgaggctatcttcattccggctggatgtccgttccaaatcactaatcttcagtcgaatattcaggtggcacttgacttcttgtgccctgaaagcgttggagagtcagcaagactagctgaagaaatccggtgtttaccaaacgaccacgaggcaaaacttcagattctagagattggaaagatatcattatacgcagctagctcagccattaaagaggttcagaaactggtcttggatccaaagtttggagcagagcttggatttgaagactctaacttaaccaaagcagtctctcacaacttagacgaggcaaccaagcggccgcagcaaaacagctgcacttaa

SEQ ID NO: 98 - protein, 930 aa, Arabidopsis thaliana
MNANEQTRSANGIGNGNGESIPGIPDDLRCKRSDGKQWRCTAMSMADKTVCEKHYIQAKKRAANSAFRANQKKAKRRSSLGETDTYSEGKMDDFELPVTSIDHYNNGLASASKSNGRLEKRHNKSLMRYSPETPMMRSFSPRVAVDLNDDLGRDVVMFEEGYRSYRTPPSVAVMDPTRNRSHQSTSPMEYSAASTDVSAESLGEICHQCQRKDRERIISCLKCNQRAFCHNCLSARYSEISLEEVEKVCPACRGLCDCKSCLRSDNTIKVRIREIPVLDKLQYLYRLLSAVLPVIKQIHLEQCMEVELEKRLREVEIDLVRARLKADEQMCCNVCRIPVVDYYRHCPNCSYDLCLRCCQDLREESSVTISGTNQNVQDRKGAPKLKLNFSYKFPEWEANGDGSIPCPPKEYGGCGSHSLNLARIFKMNWVAKLVKNAEEIVSGCKLSDLLNPDMCDSRFCKFAEREESGDNYVYSPSLETIKTDGVAKFEQQWAEGRLVTVKMVLDDSSCSRWDPETIWRDIDELSDEKLREHDPFLKAINCLDGLEVDVRLGEFTRAYKDGKNQETGLPLLWKLKDWPSPSASEEFIFYQRPEFIRSFPFLEYIHPRLGLLNVAAKLPHYSLQNDSGPKIYVSCGTYQEISAGDSLTGIHYNMRDMVYLLVHTSEETTFERVRKTKPVPEEPDQKMSENESLLSPEQKLRDGELHDLSLGEASMEKNEPELALTVNPENLTENGDNMESSCTSSCAGGAQWDVFRRQDVPKLSGYLQRTFQKPDNIQTDFVSRPLYEGLFLNEHHKRQLRDEFGVEPWTFEQHRGEAIFIPAGCPFQITNLQSNIQVALDFLCPESVGESARLAEEIRCLPNDHEAKLQILEIGKISLYAASSAIKEVQKLVLDPKFGAELGFEDSNLTKAVSHNLDEATKRPQQNSCT

SEQ ID NO: 99 - DNA, 2793 bp, Arabidopsis thaliana; identical to SEQ ID NO: 97

SEQ ID NO: 100 - protein, 930 aa, Arabidopsis thaliana; identical to SEQ ID NO: 98

SEQ ID NO: 101 - DNA, 2835 bp, Arabidopsis thaliana
atgcaggtcaattttgatgaaacttgtgattcagtgattagaatgaatgctaatgagcaaactcgatccgccaatggcattggcaatggcaatggtgagtctattcccgggattccagatgacttacggtgcaagagatcggatggtaaacagtggagatgcactgcaatgtccatggctgataagactgtttgtgagaagcactacatccaagcaaagaagcgggcggctaattctgctttcagggcgaaccagaagaaagcgaaaaggcgatcatcgttaggcgaaacagatacgtattcggaagggaagatggatgatttcgagttaccagtcaccagcattgaccactataataacggtcttgcctctgcttccaagagtaatggtagactagagaagagacataataaaagcctgatgcggtactcgcccgagacaccgatgatgaggagtttctctccacgtgttgcagtggatttgaatgatgacttgggtagagatgttgtaatgtttgaagagggctacagatcttataggacaccaccatctgttgctgttatggatccgacacgaaacagatcacaccaaagcaccagtcctatggaatactcagcagcaagcacagatgtgtctgcagagtctttgggggaaatctgccatcaatgccagagaaaagatagagagagaatcatttcttgcctcaaatgcaatcaaagagccttctgccacaattgtctatcggcaaggtactcggagatatcacttgaagaagtcgagaaagtttgccctgcatgtcgtggcttgtgtgattgcaaatcttgcctgcgttcagataatacaataaaggttcggatccgggaaatacccgttttggacaagttgcagtatctttatcgtctattatcagctgtcctaccagtcataaagcagatccatcttgaacaatgtatggaagttgaactagagaagaggcttcgtgaagttgagattgatcttgtcagggcaagattgaaagcagatgagcagatgtgctgcaacgtgtgtcggataccagttgttgactactaccgtcactgtccgaactgctcatatgacctttgcctgagatgctgtcaagatctacgggaagagtcttcagtgacgattagtgggactaaccaaaacgtacaagatagaaaaggagctcccaaactaaaactaaacttttcatacaagtttcctgagtgggaagccaacggtgatgggagcatcccttgccctcctaaggagtatggaggctgcggttcacattctttgaatcttgcccgcattttcaagatgaattgggttgcaaagcttgtgaaaaatgctgaggagattgttagtggctgcaaattatctgatcttctgaaccctgatatgtgtgattcaagattctgcaaatttgctgagagagaagagagcggtgacaactacgtgtacagcccgtcgcttgaaacgattaaaactgatggagtagctaagtttgagcaacaatgggcagagggtcggcttgttactgtgaaaatggtacttgatgactcatcttgctctagatgggatcctgagactatttggagggatatagacgagctttcggacgagaaactgagagaacatgatccattcttgaaggccattaattgcttggatggtttagaggttgatgtaagacttggggagtttacaagagcatataaagatggaaagaaccaagagacaggtcttccgctattgtggaagttaaaggactggccgagcccaagtgcttccgaggagttcattttctaccaaagacctgagtttatcagaagttttccgtttctcgagtacattcatccccggttaggccttctgaatgttgcagccaagttacctcattactcgctccaaaacgattcaggtccaaagatttatgtgtcttgtgggacgtaccaagaaatcagtgctggcgattcattgactggtattcactacaacatgcgtgacatggtatacctattggtgcacacgtctgaagaaacaacattcgaaagggtgagaaaaacaaaacctgttccagaggaacctgaccagaagatgagcgaaaatgagtcacttcttagccctgagcagaaattaagggacggagagttacatgatctatcacttggtgaagccagtatggagaagaatgaacctgagttggcgttgactgtgaatccagagaacttaacggaaaacggtgacaacatggaatcttcttgcacatcttcatgtgcaggaggagcccagtgggatgtctttcgacgccaagacgtcccaaagttgtccgggtatttgcagagaacattccagaagcctgataatatccagactgattttgtgtcacgcccgttgtatgaaggattgttcttaaatgaacaccacaagagacaactaagagacgagtttggagttgagccatggacatttgagcaacatcgtggtgaggctatcttcattccggctggatgtccgttccaaatcactaatcttcagtcgaatattcaggtggcacttgacttcttgtgccctgaaagcgttggagagtcagcaagactagctgaagaaatccggtgtttaccaaacgaccacgaggcaaaacttcagattctagagattggaaagatatcattatacgcagctagctcagccattaaagaggttcagaaactggtcttggatccaaagtttggagcagagcttggatttgaagactctaacttaaccaaagcagtctctcacaacttagacgaggcaaccaagcggccgcagcaaaacagctgcacttaa

SEQ ID NO: 102 - protein, 944 aa, Arabidopsis thaliana
MQVNFDETCDSVIRMNANEQTRSANGIGNGNGESIPGIPDDLRCKRSDGKQWRCTAMSMADKTVCEKHYIQAKKRAANSAFRANQKKAKRRSSLGETDTYSEGKMDDFELPVTSIDHYNNGLASASKSNGRLEKRHNKSLMRYSPETPMMRSFSPRVAVDLNDDLGRDVVMFEEGYRSYRTPPSVAVMDPTRNRSHQSTSPMEYSAASTDVSAESLGEICHQCQRKDRERIISCLKCNQRAFCHNCLSARYSEISLEEVEKVCPACRGLCDCKSCLRSDNTIKVRIREIPVLDKLQYLYRLLSAVLPVIKQIHLEQCMEVELEKRLREVEIDLVRARLKADEQMCCNVCRIPVVDYYRHCPNCSYDLCLRCCQDLREESSVTISGTNQNVQDRKGAPKLKLNFSYKFPEWEANGDGSIPCPPKEYGGCGSHSLNLARIFKMNWVAKLVKNAEEIVSGCKLSDLLNPDMCDSRFCKFAEREESGDNYVYSPSLETIKTDGVAKFEQQWAEGRLVTVKMVLDDSSCSRWDPETIWRDIDELSDEKLREHDPFLKAINCLDGLEVDVRLGEFTRAYKDGKNQETGLPLLWKLKDWPSPSASEEFIFYQRPEFIRSFPFLEYIHPRLGLLNVAAKLPHYSLQNDSGPKIYVSCGTYQEISAGDSLTGIHYNMRDMVYLLVHTSEETTFERVRKTKPVPEEPDQKMSENESLLSPEQKLRDGELHDLSLGEASMEKNEPELALTVNPENLTENGDNMESSCTSSCAGGAQWDVFRRQDVPKLSGYLQRTFQKPDNIQTDFVSRPLYEGLFLNEHHKRQLRDEFGVEPWTFEQHRGEAIFIPAGCPFQITNLQSNIQVALDFLCPESVGESARLAEEIRCLPNDHEAKLQILEIGKISLYAASSAIKEVQKLVLDPKFGAELGFEDSNLTKAVSHNLDEATKRPQQNSCT

SEQ ID NO: 103 - DNA, 2643 bp, Arabidopsis thaliana
atggagggtgaagttgctactaacggagtgattctcaagcataatggtgtaaaggatatttctttagaaacttgttggccagagaagaagaaaccggttgaggcaacgagtcttagcagtggttcatcagacatagaagaagagattagtgtggaatgtcctaagcgagtggctaatcaaagacggaaacggtctaaagctgatgagattaaaacgaaatcttcaagaaagaggaaatgtgatgatgagaacaagtgtgaagagaatgagaagaagcagaggagctctgttaaaaagagagcaactacatggaaagaagaagaagttgttgttgatgatgaaaagaaatgcgaacaacaactccaactagttccttccagcaaggcaacatctcgaagcaggagcaagaaatcagtcagtgtggatacttggttggttaacaacgagattgatgttagcgctttgagttcgcgttctgagtctgaactttcggattcttatctgaaaaccgagtactttaatgactgcagaagcatgacaaggagtttaaaggcaaatttgggagagcttgcaatttgccatcaatgctctaaaggggaaagaagatatcttttcatttgcaccttttgtgaagtgaggttgtattgttttccatgcataaagaaatggtatccccatttgtccacggatgatatccttgaaaaatgtcccttttgccgaggaacttgcaactgctgcacatgtttgcactctagtggtttaatcgagacatctaagagaaagctcgataaatacgaaagattttatcatcttcgcttcttgattgtggcgatgcttcctttcctgaaaaagttatgcaaagcacaagatcaagaaatcgaaaccgaggctaaggttcaagattcaatggcttctcaagttgatatatccgagagtctatgctcaaatgaagagcgtgtcttctgtaaccactgtgcaacatcaattgttgacttgcatcgaagctgtccaaagtgttcatatgaattgtgtctgaactgttgccaagagatccgtggaggttggctttctgaccgcccggaatgtcagctacaattcgagtacagagggacccggtatatacatggcgaagctgcagaaccgagctcttcttctgtttccgaggatgaaactaaaactccatccatcaagtggaatgctgatgaaaatggaagcatacggtgtgcgccaaaagagctaggaggttgcggggactctgtgctggagcttaagcgaatcttaccagtgacttggatgtcagatttggagcaaaaggcagaaacattcttagcctcttatagtatcaaaccgccaatgtcatattgtagatgttcttctgatatgagtagtatgaagaggaaggcagcttcgagggacggatctagtgacaattacctttattctcctgattctttggatgtcctgaagcaagaagaacttctgcatttccaagagcattggtccaaaggtgaaccagtgattgttcgaaatgctcttaacaacacagctggtttaagctgggagccaatggtgatgtggcgggctttatgtgagaatgttgattcagcaattagctctaatatgtctgatgtcaaagctatcgattgtttagctaattgtgaggtgaagataaatactctatgtttctttgaaggatatagcaaaggaagaacatatgaaaacttctggcctgagatgctgaagctgaaggattggcctccttcagacaagtttgaaaaccttttacctcgtcactgcgatgagttcatttccgcattaccatttcaagaatacagcgatcctagatcaggaattctcaacattgctacaaaacttcctgaaggacttcttaaaccagatcttggtccaaaaacttatgttgcatatgggacttcagatgagctcggtagaggagattcagtcactaagcttcactgtgatatgtcagatgctgtaagtttcagaattgttaatattctgatgcatactgctgaagtaacactaagtgaggagcaaaggtctgcaattgcagatttgaaacagaaacataagcaacagaatgagaaagagcttcaggagcaaaatggtttagaggaagaagaggttgtgagtgatgagattgtggtttatgatgaaacaagtggtgcactttgggacatctttaaaagagaagatgttcctaagcttgaagagtatctaaggaagcattgcatagaattcagacatacttattgctctcgtgttacaaaggtgtatcatccaatacatgatcagtcatatttcttaaccgtggagcataaaagaaaactcaaggcagaatttgggattgagccatggacatttgtgcaaaagctaggagaagcagtgtttattccagcaggttgtcctcatcaagttcggaatctcaagtcgtgcacaaaggtagctgttgattttgtttcccctgaaaacatcgatgagtgtctccgtttgactgatgagtttcgacaactccctaagaaccataaagccagagaagacaaacttgagataaaaaagatggtgatctatgcagttgaacaagctctgaaagaagtggagacattattgctagatcgcagctaa

SEQ ID NO: 104 - protein, 880 aa, Arabidopsis thaliana
MEGEVATNGVILKHNGVKDISLETCWPEKKKPVEATSLSSGSSDIEEEISVECPKRVANQRRKRSKADEIKTKSSRKRKCDDENKCEENEKKQRSSVKKRATTWKEEEVVVDDEKKCEQQLQLVPSSKATSRSRSKKSVSVDTWLVNNEIDVSALSSRSESELSDSYLKTEYFNDCRSMTRSLKANLGELAICHQCSKGERRYLFICTFCEVRLYCFPCIKKWYPHLSTDDILEKCPFCRGTCNCCTCLHSSGLIETSKRKLDKYERFYHLRFLIVAMLPFLKKLCKAQDQEIETEAKVQDSMASQVDISESLCSNEERVFCNHCATSIVDLHRSCPKCSYELCLNCCQEIRGGWLSDRPECQLQFEYRGTRYIHGEAAEPSSSSVSEDETKTPSIKWNADENGSIRCAPKELGGCGDSVLELKRILPVTWMSDLEQKAETFLASYSIKPPMSYCRCSSDMSSMKRKAASRDGSSDNYLYSPDSLDVLKQEELLHFQEHWSKGEPVIVRNALNNTAGLSWEPMVMWRALCENVDSAISSNMSDVKAIDCLANCEVKINTLCFFEGYSKGRTYENFWPEMLKLKDWPPSDKFENLLPRHCDEFISALPFQEYSDPRSGILNIATKLPEGLLKPDLGPKTYVAYGTSDELGRGDSVTKLHCDMSDAVSFRIVNILMHTAEVTLSEEQRSAIADLKQKHKQQNEKELQEQNGLEEEEVVSDEIVVYDETSGALWDIFKREDVPKLEEYLRKHCIEFRHTYCSRVTKVYHPIHDQSYFLTVEHKRKLKAEFGIEPWTFVQKLGEAVFIPAGCPHQVRNLKSCTKVAVDFVSPENIDECLRLTDEFRQLPKNHKAREDKLEIKKMVIYAVEQALKEVETLLLDRS

SEQ ID NO: 105 - DNA, 2364 bp, Arabidopsis thaliana
atggaaaatcctccattagaatctgagatcaaagaggatatgtctttgaagaatcatcctccagacaaggataaggacaaagacactatcatggaacaacctagtagtccacgtcatcggaaggttgttgctagatggttacctgatgaagcacagaggccaattatcaatgacgctcccgtattcactccatcactagaggagtttgtagatccacttgcgtatatcgagaagatacgtccactagcagagccgtatggtatctgtcgaatcatcccaccatcgacatggaagcctccttgccggcttaaggagaagagtatatgggagcagacaaagtttcctactcggattcaaaccgtagacctgcttcagaaccgtgagccgatgaagaagaaaccgaagagtagaaagcggaaacggagaagaaactcgagaatgggttcgtctaagagacgatctggttcttctcccgctgaatcgacttcatcacccgaggctgaggagaagtttggtttcaattctggttcagacttcactcttgatgagtttgagaaatatgctctgcattttaaagactcgtactttgaaaagaaagactctggtggagatatagtaaaatggacaccgtctgtggatgatatagaaggggaatactggcggatagttgagcaaccaacagatgaagtggaggtttactatggagctgacttggagaatggggtgcttggaagcgggttttataaaagagccgagaagtttaccggtagcgatatggagcagtacacattatctggctggaacttgaataacttaccacggcttcctggctctgtactctcttttgaagattgtgacatatccggagttctagttccatggctatatgtgggaatgtgtttttcatcattttgttggcatgtggaggaccatcatttatattcacttaactatcatcactttggggagccaaaagtatggtatggtgttccaggaagcaatgcaaccgctctcgagaaggcgatgaggaaacatttacctgacttgttcgaagacagcctgatctactacatggcctgggcgtatcatgctggattcaactgcggtttcaactgcgcagaagcggttaatgtggctccggttgattggttggctcatggacagaacgctgtggaactatatagtaaagagacaaggaagacttctctgtctcacgacaagcttcttcttggagcagcttatgaagcggtgaaggctctttgggaactctcagcttctgagggaaaggaaaatacaacaaatttgagatggaagagtttctgtgggaagaacgggacacttaccaacgcgatacaagctcggttacaaatggaagaggggagaattacagctcttggtagggattcttcaagcttgaagaagatggagaaggactttgattcaaactgtgaaagggaatgtttctcatgcttttatgatttgcatctctcggcttctggctgcaagtgctctcccgaagaatacgcgtgccttaaacatgcagatgatctttgttcatgtgatgtgaaagatggatttattcttctccggtacacaatggatgagttaagctcgttggtcagagcattggaaggggaatcagatgatttaaagatatgggcttccaaggttttaggcattgaacatagtgatgaagatcagacaaagactagttcagttatcagtgaggagaagaagttaaaggaaggttcttttgatctgaacattgacttagagatggattatcaagaagacgttaaagaagaagccagcactagtggcggcgagttaaccgcctcagagaaccttggtgtatcggtcgagcctataaacctcgggttcttgatttttggaaagctttggtgcaataagtatgctatattcccaaaaggattcaggagtcgtgtcaagttctacaatgttcttgatccaacaagaatgagcaattacatctctgaggttttggatgcaggactcatgggtccattgttcagggttactctggaagaatctccagacgagagcttcttcaatgtctctgcacaacaatgctgggaaatggtgatgcggagagttaaagatacatcaacaagtcttggtcttcctattttaccacagtttgagagtatcaacgggcttcaaatgtttggtttcctctcaccctctatagttcaggccattgaagctcttgacccaaaccatcgactagttgagtactggaaccacaagaaccaaacttcatcagactcaaaagatcacttcatatcatcaaactgttccgcaagtttaaccaaaggaaaacttttcggagtagatttgatgtaa

SEQ ID NO: 106 - protein, 787 aa, Arabidopsis thaliana
MENPPLESEIKEDMSLKNHPPDKDKDKDTIMEQPSSPRHRKVVARWLPDEAQRPIINDAPVFTPSLEEFVDPLAYIEKIRPLAEPYGICRIIPPSTWKPPCRLKEKSIWEQTKFPTRIQTVDLLQNREPMKKKPKSRKRKRRRNSRMGSSKRRSGSSPAESTSSPEAEEKFGFNSGSDFTLDEFEKYALHFKDSYFEKKDSGGDIVKWTPSVDDIEGEYWRIVEQPTDEVEVYYGADLENGVLGSGFYKRAEKFTGSDMEQYTLSGWNLNNLPRLPGSVLSFEDCDISGVLVPWLYVGMCFSSFCWHVEDHHLYSLNYHHFGEPKVWYGVPGSNATALEKAMRKHLPDLFEDSLIYYMAWAYHAGFNCGFNCAEAVNVAPVDWLAHGQNAVELYSKETRKTSLSHDKLLLGAAYEAVKALWELSASEGKENTTNLRWKSFCGKNGTLTNAIQARLQMEEGRITALGRDSSSLKKMEKDFDSNCERECFSCFYDLHLSASGCKCSPEEYACLKHADDLCSCDVKDGFILLRYTMDELSSLVRALEGESDDLKIWASKVLGIEHSDEDQTKTSSVISEEKKLKEGSFDLNIDLEMDYQEDVKEEASTSGGELTASENLGVSVEPINLGFLIFGKLWCNKYAIFPKGFRSRVKFYNVLDPTRMSNYISEVLDAGLMGPLFRVTLEESPDESFFNVSAQQCWEMVMRRVKDTSTSLGLPILPQFESINGLQMFGFLSPSIVQAIEALDPNHRLVEYWNHKNQTSSDSKDHFISSNCSASLTKGKLFGVDLM

SEQ ID NO: 107 - DNA, 2652 bp, Arabidopsis thaliana
atggattctggagttaaattggagcatatgaattgtttccaattatcttatcaatattcgtggacgactaggaagaagagaactctgaaaccattcatgtcaaaaggttctagccctagtagtagtagtgatagtaggaaacggaagctttcgagagctgaagatagcgatgattcagcggttaaacggaatgcgaaacgaaggagaaagatatgcaaagtagaagaatattatgaagatgatgattgcatattaagtgattgggttcagaggaatactgcgaaaaggattgataagcgcaacgaagaagttgaagttatggttaagatagagtcaggtgatgattgcacaataggtaagtggttttctgatgttagtagtaaaaggaaagataaacgacaagtagaagttgatgaagatgaggaatgggaagaagaagttacactgtgttctaagatcaaggcaacgtcgtcgcgaagcagaacccatagtttaagtgctaacagtccagaaaatgttacagatgttattagtccttgtcgttcacggtctccagcttctaatgtatcagattccattcagaaaaatgactgcaccagtagtagaaaacagagtggcccaatttgtcatcagtgcttgaaaggggaaaggataacacttctcatttgtagtgaatgtgagaagacaatgttttgtcttcaatgtataaggaaatggtatccaaatctatctgaggatgatgttgttgagaaatgtcctttatgccgtcaaaattgtaattgtagcaaatgcttgcatttgaatggtttaattgagacatcgaagagggaactcgcgaaatctgaaagacgtcatcatctccagtatttgattacgttgatgcttccttttctgaataagttatccatattccagaagctagagattgaatttgaggcaactgttcaaggaaaactgccttctgaagttgaaataactgcggctataagctacactgatgaacgtgtatactgtgatcattgtgcaacttcaattgttgacttgcatcgaagctgtccaaagtgctcttatgaactttgtttgaagtgctgtcaagagattcgtgaaggatcgctttctgaacgccctgaaatgaagttccattatgttgatagaggacatcgatatatgcatggtttagatgctgcggaaccgagcttgtcttccacttttgaagacgaagaagctaacccatctgacgctaagtggagccttggtgaaaatggaagcatcacttgtgcaccagaaaagctaggtggttgtggtgaacggatgctagagcttaggcggatcctaccactcacgtggatgtcagatttagagcacaaagcagagactttcttatcatcatacaatataagccctagaatgttgaactgtaggtgttcttctttggagacagagctgacaaggaaatcagcttcgaggacaacatcaagtgacaactaccttttctgtcctgaatctctcggtgtcttgaaggaagaagagcttcttcattttcaagagcattgggcaaaaggcgaaccagtaatcgttaggaacgctcttgacaacacacctggtttaagctgggagccgatggttatgtggcgggctttatgcgaaaatgtgaattcaacatcaagctctgagatgtcccaagtcaaagcaattgattgcttagctaattgtgaggtggagatcaatactcgtcagttctttgaaggttatagcaaaggaagaacatatgaaaatttctggcctgagatgttgaagcttaaggactggcctccttctgataagtttgaagatcttctacctcgtcactgtgatgagttcatatccgcgttacctttccaggaatatagtgatcctagaactggaattcttaacattgcaacaaagcttcctgaaggatttatcaaaccagatttaggtccaaaaacttacatcgcctatgggattccagatgagcttggtagaggcgattccgtgactaagcttcactgcgatatgtcagacgcggtgaatattctaacgcatacggccgaagtgaccctaagtcaagaacaaatatcctcagtcaaagcactgaaacagaaacacaagttacagaataaggtcgataaacagagtactgaagactgtaacgaaaaggaagaagaagaagaagaagaattgaacatgccagagatttcgagcaatgaaaatgaagaaacgggcagtgctctttgggacatatttaggagagaagacgttcccaagttagaagagtatctaagaaagcattgcaaagaatttagacacacttattgtagtccagttacaaaggtttatcatccgatacatgaccaatcatgctatttaaccttagagcacaaaagaaaactcaaggcggaatatgggatcgagccatggacatttgtgcaaaagctaggtgaagcggtgtttattcccgcgggttgtcctcatcaagttcggaatctaaagtcgtgcacaaaagtcgcagttgactttgtgtcaccagagaacatccatgagtgtctgcgtttgaccgaagagtttcgccaacttcccaaaaaccacaaggccagagaggacaaactcgaggcaagtcttttatctctttga

SEQ ID NO: 108 - protein, 883 aa, Arabidopsis thaliana
MDSGVKLEHMNCFQLSYQYSWTTRKKRTLKPFMSKGSSPSSSSDSRKRKLSRAEDSDDSAVKRNAKRRRKICKVEEYYEDDDCILSDWVQRNTAKRIDKRNEEVEVMVKIESGDDCTIGKWFSDVSSKRKDKRQVEVDEDEEWEEEVTLCSKIKATSSRSRTHSLSANSPENVTDVISPCRSRSPASNVSDSIQKNDCTSSRKQSGPICHQCLKGERITLLICSECEKTMFCLQCIRKWYPNLSEDDVVEKCPLCRQNCNCSKCLHLNGLIETSKRELAKSERRHHLQYLITLMLPFLNKLSIFQKLEIEFEATVQGKLPSEVEITAAISYTDERVYCDHCATSIVDLHRSCPKCSYELCLKCCQEIREGSLSERPEMKFHYVDRGHRYMHGLDAAEPSLSSTFEDEEANPSDAKWSLGENGSITCAPEKLGGCGERMLELRRILPLTWMSDLEHKAETFLSSYNISPRMLNCRCSSLETELTRKSASRTTSSDNYLFCPESLGVLKEEELLHFQEHWAKGEPVIVRNALDNTPGLSWEPMVMWRALCENVNSTSSSEMSQVKAIDCLANCEVEINTRQFFEGYSKGRTYENFWPEMLKLKDWPPSDKFEDLLPRHCDEFISALPFQEYSDPRTGILNIATKLPEGFIKPDLGPKTYIAYGIPDELGRGDSVTKLHCDMSDAVNILTHTAEVTLSQEQISSVKALKQKHKLQNKVDKQSTEDCNEKEEEEEEELNMPEISSNENEETGSALWDIFRREDVPKLEEYLRKHCKEFRHTYCSPVTKVYHPIHDQSCYLTLEHKRKLKAEYGIEPWTFVQKLGEAVFIPAGCPHQVRNLKSCTKVAVDFVSPENIHECLRLTEEFRQLPKNHKAREDKLEASLLSL

SEQ ID NO: 109 - DNA, 3351 bp, Arabidopsis thaliana
atgtatggtaatgacttggatacttctgtttacgggagtggttttcctcgaataggcgaccaaagaccagaatcagttgaggcagatatatgggatgagtattgtggtagcccctggaatctcaataacatgcctaagttgaaaggatctatgcttcaggccattcgacataacattaatggtgttacagtgccttggctatatcttggaatgctcttctcttctttttgttggcattttgaggaccattgtttttactctgtcaattatctacactggggagaggcaaaatgttggtatggtattccaggcagtgctgctagtgcttttgaaaaggtcatgcgaaaaaccctacccgatctctttgatgctcagccagatttgctctttcaactagttaccatgttgagtccgactgttttacaagaaaataaagtcccggtctacacagtattacaggagccaggaaacttcgtgatcacatttccaaaatcctttcatgctggattcaattttggtctaaattgtgcagaggccgtcaactttgctactgctgattggctaccttatggtggttctggggcggagctgtatcggctgtaccggaaaccttcagtcatatctcatgaagagcttctctgcgtggtagctaagggaaactgctgcaataacgaagggtcaatacatttgaagaaagaattgctcagaatatacagcaaggaaaaaacctggagagagcagctctggaaaagtggtattttgagatcttctcctatgtttgtgcctgaatgcgctgattctgtgggcatcgaagaggatccaacatgcatcatatgccagcagtttcttcatctttctgctatcgtctgcaattgcaggccatctgtttttgcatgcttagagcactggaagcatctttgtgaatgtgaacctacgaagttgcgacttgaatatcgttatacccttgccgagttagatatgatggtacaagaagttgaaaagtttggtgggtgcaaaacacaagaaaccaaaatctcacaacggccgagttcaggcaccaaacgatctattgctttaaataaaaagcaggagggaatgcaagtgagtcaggcacggccagcagacaaatggcttcttagagcatcaaaggttcttgacgctgcgttttctagtgttgaatatgccacccttttgaaggaatcagaacagtttctttgggctggatcagaaatggaccgtgtacgagatgttacaaaaagtttgaacaaagcaaagatatgggctgaagctgttagtgactgtctttcaaaagtcgaaggtgaagtcaacgatgattcaatgaaagttcacttggaatttattgatgagttgctgagagttaatcctgttccttgctttaattctggttatctgaaactaaaggactatgctgaagaagctagaaaattgtccgagaaaatcgattcagctctctcgagtagcccaactatcacccagctggagctattgcattctgaagtctccagatcgccaatctccctaaaaaaacacgagatcttgtcaaagaaaatctcttccgcaaagatgttagctaaaagggcgaaacgctatctcacagacgctaaacctccaggaattgaaatggatgcacttttcaagctaaattcagagatgttagagcttcatgttcaacttccagaaacagaagggattctggatttggtaaagaaatcagaatcagcccgtgataaaagtaacaaagttttgactggttctttatctctcgagaatgtggaagagttgcttcatgaattcgatagtttcagcattaacgttcctgagttgaatatcctgaggcagtatcatgttgacactttgtcttggatttcacgctttaatgatgtaatggttgatgttcgtgaaggcaaggaccaacgaaagctaattagtgacctcagttcccttctacgggatggagcatccttaggcattcaagttgaaggactccctcttgttgaagttgaattgaagaaggcatcttgccgggaaaaagctcgaacggtttatactgcaagaaaatctctggatttcattgagcaactgctctcggaagctgttatactacacatcgaagaggaggagatatttgttgagatctcgggaattttgtcaacagcacggtgttgggaggaaagagcaagcactatccttgaaaatgaaactcagatgtacgagcttaaagatctcgtaaggatgtcagtcaacattgatgcggttttacctactctgcaaggcatagagaacacaatctcgtcggctgaaacttggcttcagaaatctgagccttttctatcagccacttcctctatggcatcatctccatgttctatgcttgaacttcctgtattaaaggatctagttactcaggctaaattgctcaatgttcagcttcaagagccacgaattcttgaaacattgttgcttaactgcgagaggtggcagtgtgataatcatcagctcttgcaagaaactgaagatttgttggacaatgcgaaaatagatgatggcacgcatagcaatatccttccgaagataatggatttgataaccagagtggactccgctaggagatctggtctggcccttggtctcaatttcgatgaacttcccaaacttcgaactgcaagtctaaaactaggatggtgttgtaagaccatcacgttaagctctagctcacctacctctgagttgctagaagatgttggaaagccctcgttacagcatattcagcagcacttaaaagagggacaaacacttgaaatattacctgaagagtattacttaggcaagagactcatggagttaaaagacactggactggagtgggcaaaacgagctagaaaggtggtaacagactcaggtgctcttgccttggaagatgttttcgagcttatttctgagggtgaaaacttacctgttcatgcagagcaggaacttcagtctttacgagctcggagtatgttacactgcatttgtctaaagccatacaactcaagatccatggtttcttgtagtcaatgtggcgaatggtatcacacctattgtttaaagcttcattggcggcctaaggcttatgtctgctccgcttgctgtccactggcagaaaccactccacagatcgatcccgccagagcaacagagccagagagaccgtctctgaaccaaagacggacaagaatggtcgcgactgatgcagcagttaatgacttaaagtggaaaacccgaaaacacatcaaacggacaactaaacggagtcctcaggttcatattcttccctggtttttcacttaa

SEQ ID NO: 110 - protein, 1116 aa, Arabidopsis thaliana
MYGNDLDTSVYGSGFPRIGDQRPESVEADIWDEYCGSPWNLNNMPKLKGSMLQAIRHNINGVTVPWLYLGMLFSSFCWHFEDHCFYSVNYLHWGEAKCWYGIPGSAASAFEKVMRKTLPDLFDAQPDLLFQLVTMLSPTVLQENKVPVYTVLQEPGNFVITFPKSFHAGFNFGLNCAEAVNFATADWLPYGGSGAELYRLYRKPSVISHEELLCVVAKGNCCNNEGSIHLKKELLRIYSKEKTWREQLWKSGILRSSPMFVPECADSVGIEEDPTCIICQQFLHLSAIVCNCRPSVFACLEHWKHLCECEPTKLRLEYRYTLAELDMMVQEVEKFGGCKTQETKISQRPSSGTKRSIALNKKQEGMQVSQARPADKWLLRASKVLDAAFSSVEYATLLKESEQFLWAGSEMDRVRDVTKSLNKAKIWAEAVSDCLSKVEGEVNDDSMKVHLEFIDELLRVNPVPCFNSGYLKLKDYAEEARKLSEKIDSALSSSPTITQLELLHSEVSRSPISLKKHEILSKKISSAKMLAKRAKRYLTDAKPPGIEMDALFKLNSEMLELHVQLPETEGILDLVKKSESARDKSNKVLTGSLSLENVEELLHEFDSFSINVPELNILRQYHVDTLSWISRFNDVMVDVREGKDQRKLISDLSSLLRDGASLGIQVEGLPLVEVELKKASCREKARTVYTARKSLDFIEQLLSEAVILHIEEEEIFVEISGILSTARCWEERASTILENETQMYELKDLVRMSVNIDAVLPTLQGIENTISSAETWLQKSEPFLSATSSMASSPCSMLELPVLKDLVTQAKLLNVQLQEPRILETLLLNCERWQCDNHQLLQETEDLLDNAKIDDGTHSNILPKIMDLITRVDSARRSGLALGLNFDELPKLRTASLKLGWCCKTITLSSSSPTSELLEDVGKPSLQHIQQHLKEGQTLEILPEEYYLGKRLMELKDTGLEWAKRARKVVTDSGALALEDVFELISEGENLPVHAEQELQSLRARSMLHCICLKPYNSRSMVSCSQCGEWYHTYCLKLHWRPKAYVCSACCPLAETTPQIDPARATEPERPSLNQRRTRMVATDAAVNDLKWKTRKHIKRTTKRSPQVHILPWFFT

SEQ ID NO: 111 - DNA, 2751 bp, Arabidopsis thaliana
atgacgacgttaggacaaagagatcgccgaccagatgctctcggtagtctcagtgttctaccagatgagaccatctgtgttcttctcgaataccttgctccccgagatattgctcacctcgcttgtgtcagcagtgtgatgtatattctatgtaatgaagaaccattgtggatgagtttgtgtctcagaagagcaaaaggtcctcttgaatacaaaggttcttggaaaaaaacaacattgcatctagaaggagttactcaagaaaatgacgcatacagaaaatgttttcattttgatggattcatgtcgttgtacttgtataaacgattctataggtgtaatacatctcttgacgggttctcttttgataatgggaatgtggaacgtaggagaaatatctccttggatgagttttctaaggaatacgacgccaagaaacctgttttgctttctggccttgctgattcttggccagccagtaatacgtggactatcgaccaactctcagagaaatatggtgaagtcccgtttagaatatctcagaggagccccaacaaaatttccatgaagttcaaggattacatcgcatatatgaaaactcagcgggatgaagatcctctatacgttttcgatgacaagtttggagaagctgctccagaattattgaaagactatagtgtgccccatttgtttcaagaagattggtttgagatcttagacaaggaaagtcgtcctccatacagatggcttatagttggtccggagaggtctggtgcatcttggcatgttgacccagctcttaccagcgcctggaacaccctgctttgcggtcggaaaaggtgggcattgtatccccctggaaaagtgcctctaggtgttacagtccatgtcaatgaagatgagggtgatgtcagcattgatacaccctcatctctgcagtggtggctagactattatccccttcttgcggacgaagacaaaccgattgagtgcacactactacctggcgaaacgatttatgttccaagtggttggtggcactgtatccttaatcttgaaccaacagtggctgttacccagaattttgtgaacaaagaaaactttgggttcgtgtgcttggatatggcgcctggttaccatcacaaaggagtttgccgtgctgggcttcttgctcttgatgatgaaaattctgaagatttggaagaagaaacacacgatgaagaagataatactttgagctattcagaccttaccaggaaagagaagaggacacggatgaatggaggtggagagactgaaaaccgcgaagaggatgtgaatggagtatcgaagagatataatatgtggaagaatggattttcatatgatatcgatttcctcgcttcatttcttgataaagaaagagatcattacaatttcccatggtcaatggggaactctgtaggccaacgagaaatgagagcctggctatccaagctttgggttctgaagcctgagatgagagaactaatatggaagggagcatgcattgctttaaatgctgagaaatggttgcgatgcctagaggaagtatgtactttccacaacttgccgttggttaccgaagatgaaaagcttccagttggaactggcagcaaccctcttgagttttatgacattcttggccgggctgattctcctttgaaaacacatattcctgaagttctagcaagcgggattcttttcttcgaaaaaggatcttacaaagttgtcccttgggatggcaagagaatcccagatattatctctagctccagtttcgattttgatgcatccatgttaaacagcgaattcccatttggtatttggaataaaacgctacgtgaacataaaaaccaggggaagccagcacccgattcttttggttcattgagttcacatgtttggccatatattataaccaaaagatgcaaagggaagatttttgcccaactaagagatgatctaacctggaacgacgctcagaacctggctttctttctcggacaacaactacgcaaccttcatctacttccatatccaccggtcacacgtccggagttgttgaatgtgaatgctgttcatgaggagttgaacattccagcagaatggaaagtttttgtcgatgctctgtgccaaaagaagaaggacgtcactagtcgtctggaaaactggggaaatccgatacctcgggctctgatgaccaagatagacgaatacattcccgatgacttttttgtagatttactccacgtcttcaaggagacaaatggtggagatgaaatcaagccctgcacctggatacactcagacgtaatggatgacaacattcacatggaaccatacgcagatgattcagttgatggtcaacacaactcatggcgtcccagtcatattcttgacttcagcgatttaaccataggagatcccatctgcgacttgataccaatatacttggacgtctttagaggagacgctgatcttcttaagaagcttctagaaaattatggacttccattaatcagaagtagatcttcagagaacggaacaacaaaaacagcagacagtacgaggaagaaagtattgtctccatcctaccgtacaatgtgttactgtatattacatgaagaaaatgtgttgggttcaatattcagtatttgggacgaacttcggactgctgaatcatgggaacaagttgagcaaactgtttggagtctacttaacacctactaa

SEQ ID NO: 112 - protein, 916 aa, Arabidopsis thaliana
MTTLGQRDRRPDALGSLSVLPDETICVLLEYLAPRDIAHLACVSSVMYILCNEEPLWMSLCLRRAKGPLEYKGSWKKTTLHLEGVTQENDAYRKCFHFDGFMSLYLYKRFYRCNTSLDGFSFDNGNVERRRNISLDEFSKEYDAKKPVLLSGLADSWPASNTWTIDQLSEKYGEVPFRISQRSPNKISMKFKDYIAYMKTQRDEDPLYVFDDKFGEAAPELLKDYSVPHLFQEDWFEILDKESRPPYRWLIVGPERSGASWHVDPALTSAWNTLLCGRKRWALYPPGKVPLGVTVHVNEDEGDVSIDTPSSLQWWLDYYPLLADEDKPIECTLLPGETIYVPSGWWHCILNLEPTVAVTQNFVNKENFGFVCLDMAPGYHHKGVCRAGLLALDDENSEDLEEETHDEEDNTLSYSDLTRKEKRTRMNGGGETENREEDVNGVSKRYNMWKNGFSYDIDFLASFLDKERDHYNFPWSMGNSVGQREMRAWLSKLWVLKPEMRELIWKGACIALNAEKWLRCLEEVCTFHNLPLVTEDEKLPVGTGSNPLEFYDILGRADSPLKTHIPEVLASGILFFEKGSYKVVPWDGKRIPDIISSSSFDFDASMLNSEFPFGIWNKTLREHKNQGKPAPDSFGSLSSHVWPYIITKRCKGKIFAQLRDDLTWNDAQNLAFFLGQQLRNLHLLPYPPVTRPELLNVNAVHEELNIPAEWKVFVDALCQKKKDVTSRLENWGNPIPRALMTKIDEYIPDDFFVDLLHVFKETNGGDEIKPCTWIHSDVMDDNIHMEPYADDSVDGQHNSWRPSHILDFSDLTIGDPICDLIPIYLDVFRGDADLLKKLLENYGLPLIRSRSSENGTTKTADSTRKKVLSPSYRTMCYCILHEENVLGSIFSIWDELRTAESWEQVEQTVWSLLNTY

SEQ ID NO: 113 - DNA, 2421 bp, Arabidopsis thaliana
atggagcctttcagtgctgctcagaacaaagaggacaaggacactagcgtagaacctcctcgtaggcgttgtcatcgaaagaacaagggcactaatgtagaacctcctagtagtccgtatcatccgaaggttcttgctagatgggatccggctaatgaaaagaggccagacattggtgaagctccagtattccaccctacatcagaggagtttgaagatacgcttgcttacatagaaaaaatacgtcccttagctgaatcatttggtatttgtcgaatcgtgccaccgtcgaattggtctcctccttgccggcttaaaggggatagtatatggaagaataaaaatttcccaacccgtgttcagtttgttgacctgcttcagaacagaggacccgtgaagaagaagacacctaaaggaaggaaacggaaacgaggaaaatactcaagaaccgtcgcccccaagaaacgaaatggctctgtttctaaatcagtttctacccccaaggcgaccgaagaagagaattttggtttcgaatctggtccagaatttactcttgagaagtttgagaaatacgctcaagatttcaaagactcctactttgaaagaaaagacaatgttggagatccatctgttgaggagatcgaaggagagtactggagaatcattgagaaagaaacaaatgaagttaaggtattgtatgggacggatttggagaatcccatacttggaagcggtttctccaaaggggtaaaaattccaaccagaagaaatgatatggataaatacatatcttctggttggaatttgaacaacctcgcccgtctgcagggatctctactatcctttgaggattgtgagatctcaggggttcaggtgccatggctctatgtgggcatgtgcttttcaacgttttgttggcatgttgaggacaatcatctatattcactgaactatcatcactttggcgagccaaaagtatggtacggagttccgggaagccatgcaactgggctagagaaggcaatgagaaaacatctaccagatttgttcgatgaacaacctgatctacttcatgaactggttactcagttttctccaacgattttgaaaaatgagggagtcccggtttatcgagctgttcagaatgcaggggagtatgttctaacattccctagagcatatcattcgggtttcaactgcggattcaactgtgcagaagcggtgaatgtggctccggttgattggctggctcatggacagaatgctgtggaaatatatagccaagagactcggaaaacgtctctatctcatgacaaaattctccttggagcagcttttgaagctgttaagtccctctcagcacatggggaagataatacaaaaaggttcagctggaagagattctgtgggaaggacggtatcataactaaggccatcgaggcacggttacggatggaagaaaaaagaattgaggctcttggaaatggtttcagcttggtaaagatggataaagactttgattcaaactgtgaaagggaatgcatctcttgctttagtgacttgcatctctctgctactggctgcaagaattgctcatctctcgaagaatatggttgcacgaaacacgatatttgttcatgtgaagggaaagaccgtttcatttttcttcgttacaccatagatgagttaagctcattggtaagagcattggaaggtgaatcagatgatctaaaagcttggctttccaaagtcatggaaggttgttcagagactcagaagggagaatctagtgggattatcgttaaggaaaagcaggtacaagaagaatgttttgatctgaatggtgagtgtaataaatcttctgagatatgtgaggatgcatccatcatggacttagctgcttatcatgttgaacctataaatcttgggttcttggtcgtgggaaagctttggtgtaacaagcatgctatatttccaaaagggtttaagagtcgtgttaagttctataacgtgcaagatccaatgagaataagctattacgtctctgagattgtagatgcaggacttctgggtccactcttcaaggttactttggaagaatctcaagacgagagcttctcttatgcctcacctcagaagtgctgggaaatggtgttgcttagagttaaggaagagatcatgagacgcagcaaccaaaaacaagatgtccatatgttggaaagcatcgatgggttaaaaatgtttggctttcgctctccgtttattgttcaggccactgaggctcttgacccgaaccatggccaagtggagtattggaaccataagaatgagaaggattcgctggaaatgaaagattgcttcatgtcaaattcttcccagagcttaagcaaagcaagactttttggggttgatttgaattga

SEQ ID NO: 114 - protein, 806 aa, Arabidopsis thaliana [sequence omitted]

SEQ ID NO: 115 - DNA, 2127 bp, Arabidopsis thaliana
atgggcattgaaggtgtatcaacgtatttgaaatctggaaatatggacacaatttctgctccgccaggttttgtatctcaaacatcgtttgtgctgaggaatgtaccccgagacaaagaaagtcccaggtccgtgtcgagacaagagcagacaactggattcggcacagatgataaagatagttgcaatatgtttcttaaaagccgaccgtggatagtgcatggtcacacaattcccagctcagaggccttaaggccgaaaaaaactgaggtacggagaagacggcccctcaaagtgtctgagaccaaagtccttgaggaagctcctgtgttcaacccaaccgaagaggaattcagggacacactctcatatatatcaagcttgcgtgacagagctgagccgtatggaatctgttgtgttgttcctccaccttcatggaaacctccatgtcttctcaaggagaaacaaatatgggaggcttctacatttttccctcaagttcagctctttggaattcagaccgagaaccgaaagattaaaaaggaggttgatgcagatagtaatgatgctgcatctgaaggggttcagttatgtagagtagaacgtggtcctgggtatactttgaagtcctttaaaaactttgcagatacatacaagaagagtcattttggcatgaaggatgaggttttgggttcagagaactcatctccatcacttaaaccaaatgagctaattgtggcagacattgaaaaagagtacagacaaattgttgagagtccacttattgaaattggggtgctttatggcaatgatttagacactgcaacgtttggaagtggatttcccttatctgcaccatctgaatctagcaaatattcatcaggttggaatctgaacagtacggctaagcttcctggttctcttctatcattagaagactgcgaatcagtttgtgttcctcgtctaagtgtaggaatgtgcttgtcttcccagttctggaaatctgagaaggagagactctactctctctgctatttgcatgtgggcgctcctagagtgtggtattccgtagcaggatgtcatcgatcaaagtttaaggctgccatgaaaagcttcatccttgagatgtcaggagaacagccaaagaagagtcataatcctgtgatgatgatgtctccatatcaattgagcgtggagggtataccagtgacccgctgtgtccagcaccctggccagtatgttattatatttccagggtcgtattactctgcctttgactgtggcttcaactgtttggagaaagcaaactttgctccccttgattggttgccccatggggatattgctgttcaggtgaatcaagagatgagtaaaacgtcgctgatatcgtatgataagctattatttagtgctgcaagggaagctgtaaaatgtcttaaggaatatgggttgtcgaagaaaaacacagcatgttacacgagatggaatgattcttgtgggacggatgggttgttctccaacataatcaagtcacggatcaaactggagaaaaatagacgtgaatttcttatcagttcactagaatcgcaaaggatggacaagagttatgatgctgtgaacaaaagggaatgctgtgtatgtcttggggatttgtatctttccgcggttaactgttcatgctctgctaatcgttactcgtgtctgaaccacatgaggaagctctgtgcatgtccgtgtgacagaaagagttttctctataggtacactatggatgagttgaatcttctcgttgaagccctggaaggtaaaaagctcagctctatgttcagatgggcaggcatagatcaaaaattctgtgcttctccagccaccacaagttcaaaacccgaagaagacaaaggcaaggaaacagatgaggttacaccctgtaatatcacgaggaaagatgtcgcagctggaactaaggaccagacaagagtgaaggcgagatctttggctgatatactgaatgttaaagatggaaacaatgatgcaaaggagactttagaatcttgttctaagaaatcaaacaggccatgcgataacgattcctctgaggccaacgcgccaaagaaacagaagcagtga

SEQ ID NO: 116 - protein, 708 aa, Arabidopsis thaliana
MGIEGVSTYLKSGNMDTISAPPGFVSQTSFVLRNVPRDKESPRSVSRQEQTTGFGTDDKDSCNMFLKSRPWIVHGHTIPSSEALRPKKTEVRRRRPLKVSETKVLEEAPVFNPTEEEFRDTLSYISSLRDRAEPYGICCVVPPPSWKPPCLLKEKQIWEASTFFPQVQLFGIQTENRKIKKEVDADSNDAASEGVQLCRVERGPGYTLKSFKNFADTYKKSHFGMKDEVLGSENSSPSLKPNELIVADIEKEYRQIVESPLIEIGVLYGNDLDTATFGSGFPLSAPSESSKYSSGWNLNSTAKLPGSLLSLEDCESVCVPRLSVGMCLSSQFWKSEKERLYSLCYLHVGAPRVWYSVAGCHRSKFKAAMKSFILEMSGEQPKKSHNPVMMMSPYQLSVEGIPVTRCVQHPGQYVIIFPGSYYSAFDCGFNCLEKANFAPLDWLPHGDIAVQVNQEMSKTSLISYDKLLFSAAREAVKCLKEYGLSKKNTACYTRWNDSCGTDGLFSNIIKSRIKLEKNRREFLISSLESQRMDKSYDAVNKRECCVCLGDLYLSAVNCSCSANRYSCLNHMRKLCACPCDRKSFLYRYTMDELNLLVEALEGKKLSSMFRWAGIDQKFCASPATTSSKPEEDKGKETDEVTPCNITRKDVAAGTKDQTRVKARSLADILNVKDGNNDAKETLESCSKKSNRPCDNDSSEANAPKKQKQ

SEQ ID NO: 117 - DNA, 3084 bp, Arabidopsis thaliana
atggattctgtggaggaagaaggtgttgttagggttgaagaagagaacggacgcggtggtctccgtaggcatcggagggtttctacgaagctggcgaattacgtagatcctccgactgacgacgaagaagatggaggacccaagcgaaagggcaaaaggggtggaaatagggctccgaaaaagacaccgaagaaagacgaggagatgcaaaagaacgaaattgatgaagcaaaccgagtcactggtctggtgaaggaaaaaagagccgcgactaagattctgaatcgcaaagactccattattgaagtaggagaagcttctggaagcatgcccaaggaagtaaagggaattaggattgggaaaaggaagggagaaatcgatggtgagattccaactaagccgggcaagaagccaaagactacagtagacccgagaatcattggttacagaccggacaatatgtgccatcaatgtcaaaagagcgataggattgttgaacggtgtcagacctgcaatagtaagcgttattgtcatccatgcttggacacttggtacccccttatagcaaaagaagatgttgccaagaaatgcatgttctgctctagtacttgcaattgcagagcatgcttgcgtctagatactaaattgaaagggataaattcgaacctcatagtcagcgaggaagaaaaggtccaagcctctaagtttattctgcagagccttctcccacatctgaaaggaataaatgatgaacaagttgctgagaaggaagttgaggccaaaatatacggactgaagtttgaagaggtgaggccccaagacgctaaagctttccctgatgaaagactatactgtgatatctgcaagacttctatctatgatctccataggaattgcaagtcctgtagttttgatatctgccttagctgttgccttgagatccgcaatggaaaggctctggcatgtaaggaggatgtgtcttggaattatattaaccgaggtttagagtatgaacatggacaagaaggaaaagtgattgaaaagccggcgaataagctagatgataagttgaaagataagctggatggtaagccggatgataagccgaagggtaagccaaagggtaggccaaagggtaagccggatgataagccgaagggtaaactgaagggtaagcaggatgataaaccggatgataagccagatgagaagccggttaatacagaccatatgaagtacccttctctgtggaaagcaaatgaagctgggatcattacttgttgttgtggtgctggggagttagtgctgaaacgactacttccggatggttggatatctgagttggtcaacagagttgaaaaaactgctgaagctggcgagcttttgaatttacctgaaacggttttggagcgatgcccttgttctaactctgacagacatattgacatagacagctgtaatttgttaaaagctgcttgtcgagaaggttcagaagacaattatctttactctccaagtgtatgggatgttcaacaagatgatttgaagcattttcagcaccattgggtaaaaggcgagcctgtgattgtgagaaatgtgcttgaagctacatctggtttaagctgggaaccaatggtaatgcatcgtgcctgccgccagataagccatgtccagcatggatcacttaaggatgttgttgctgttgattgtttggacttctgtgaggtaaaagttaatcttcatgaattttttactggatacacggatggccgatatgatcgaatgggttggccactagttctgaaactgaaagattggcctccagctaaagtcttcaaagataacttgccacgtcatgctgaggagttcttatgtagtttgcctttgaagcattacactcatccggttaatggacctttgaatctcgctgtcaagcttccccaaaattgcttgaagccagacatgggaccaaagacgtacgttgcttctggatttgctcaagaattaggccgtggagattctgttactaagctccactgcgacatgtctgatgcggtgaatattttgacgcacatatctgaagtgcccaatatgcaacctggaattggaaatctgaaaaagaagcatgccgaacaagatctcaaggagctgtatagctcagtagctaacaaggaggaaatgatggagattcttgaaaattccagacaacaagtccaaaatgttgaaactgatgatggagctctttgggacattttccgtagagaagatattcctaaattagaaagttacattgagaaacatcacaaggagttcagacatctctactgctgtcctgtgtctcaggttgttcatcctatacatgaccagaacttctatctgacgcggtatcatataatgaagctgaaagaagaatatggcattgaaccttggaccttcaatcagaagcttggtgatgctgttttgatacctgtaggttgccctcatcaagttagaaatttgaagtcctgcaataaggtagcgcttgacttcgtctcacctgaaaatgtcagcgagtgtttacgcttgacaaaacagtatcgtctacttccaccaaatcattttgcaaaagaagacaagttaggggttaagaagatgatagtccatgcagttgataaagctctcagagacttaagtggagagaagtctccagaacctgaagagaagaaacaaaatatgagagggccgaagaagggggcagccaaggcagttgccaaggctctcaaagacttatctccaagtgaaaagaagtcttcggaagcagctgaagaggagatatcaaatgggatagtcaatgcaatcgataagggtctcaaagacttacctccaagtgaagagaagtcttccgaagccaaagtggagatatcaaatgggatagtcagtgcaatggataaggatctcgaacacatatcttcaagcgaaaagaagtctacggaagaggaaggggtgaaaagaccaaatattgtgaggacatatgagcggagaaaaaagctgggaagtgaagtaaccaacgcatacattgacagattagaaatggagaagatgtag

SEQ ID NO: 118 - protein, 1027 aa, Arabidopsis thaliana
MDSVEEEGVVRVEEENGRGGLRRHRRVSTKLANYVDPPTDDEEDGGPKRKGKRGGNRAPKKTPKKDEEMQKNEIDEANRVTGLVKEKRAATKILNRKDSIIEVGEASGSMPKEVKGIRIGKRKGEIDGEIPTKPGKKPKTTVDPRIIGYRPDNMCHQCQKSDRIVERCQTCNSKRYCHPCLDTWYPLIAKEDVAKKCMFCSSTCNCRACLRLDTKLKGINSNLIVSEEEKVQASKFILQSLLPHLKGINDEQVAEKEVEAKIYGLKFEEVRPQDAKAFPDERLYCDICKTSIYDLHRNCKSCSFDICLSCCLEIRNGKALACKEDVSWNYINRGLEYEHGQEGKVIEKPANKLDDKLKDKLDGKPDDKPKGKPKGRPKGKPDDKPKGKLKGKQDDKPDDKPDEKPVNTDHMKYPSLWKANEAGIITCCCGAGELVLKRLLPDGWISELVNRVEKTAEAGELLNLPETVLERCPCSNSDRHIDIDSCNLLKAACREGSEDNYLYSPSVWDVQQDDLKHFQHHWVKGEPVIVRNVLEATSGLSWEPMVMHRACRQISHVQHGSLKDVVAVDCLDFCEVKVNLHEFFTGYTDGRYDRMGWPLVLKLKDWPPAKVFKDNLPRHAEEFLCSLPLKHYTHPVNGPLNLAVKLPQNCLKPDMGPKTYVASGFAQELGRGDSVTKLHCDMSDAVNILTHISEVPNMQPGIGNLKKKHAEQDLKELYSSVANKEEMMEILENSRQQVQNVETDDGALWDIFRREDIPKLESYIEKHHKEFRHLYCCPVSQVVHPIHDQNFYLTRYHIMKLKEEYGIEPWTFNQKLGDAVLIPVGCPHQVRNLKSCNKVALDFVSPENVSECLRLTKQYRLLPPNHFAKEDKLGVKKMIVHAVDKALRDLSGEKSPEPEEKKQNMRGPKKGAAKAVAKALKDLSPSEKKSSEAAEEEISNGIVNAIDKGLKDLPPSEEKSSEAKVEISNGIVSAMDKDLEHISSSEKKSTEEEGVKRPNIVRTYERRKKLGSEVTNAYIDRLEMEKM

SEQ ID NO: 119 - DNA, 4083 bp, Arabidopsis thaliana
atggcggtttcagagcagagtcaagatgtgtttccatggcttaaatcgttaccggttgctccagagttcagacctactctagcagagtttcaagatccgatcgcttacattttgaagattgaagaagaagcttctagatatggaatctgtaaaattctgcctccactgcctcctccttccaaaaaaacctcgatttctaatctcaaccgttctctggcggcaagagcggcggcgagggttcgtgacggcggctttggcgcgtgtgattatgacggtggtcccacattcgccacgcgccagcagcagatcgggttttgccctaggaaacagcgtccagtgcagagacctgtgtggcagagtggagaggagtactcttttggtgagttcgagtttaaagctaagaactttgagaagaattatctcaagaaatgtggtaaaaagagtcaactctctgcccttgaaattgaaacactttactggagagccactgtggataaacccttctctgttgagtatgccaatgacatgcctggctcggcttttatccctctgagtctggctgctgcgaggaggagagagtctggtggtgaaggaggaacagttggtgagaccgcttggaacatgagggcaatgtctagagccgaaggatcattgcttaagttcatgaaggaagagatccctggagttacatcaccaatggtgtatgttgctatgatgtttagttggtttgcttggcatgtggaggaccatgaccttcatagtctcaattacttgcatatgggtgctggtaagacttggtacggtgtgccaaaggatgctgctctggcttttgaggaggttgttagggttcatggttacggtgaagagctcaatcctcttgtgacattttctactcttggtgagaagacaactgtgatgtctcctgaagtatttgttaaagccggaataccgtgttgcaggttagtgcaaaatcctggagagtttgtcgtcacctttccgggagcttatcattcgggatttagtcatggatttaattttggagaagcatctaacattgccactcccgaatggttgagaatggctaaagatgctgctatccggcgagctgctataaattaccctccaatggtttctcatctccagctactttatgactttgtattggctctaggttctagagtgccaacaagcatcaatcccaaaccacggagttctagattaaaagataaggcaagaagcgaaggagaaagattgaccaaaaagctatttgtgcaaaacattatccacaacaacgaattgctttcttctctcggaaaaggatccccagtggcccttctcccacagagttcctcagatatatcagtttgttctgacctgcgaattggatcccatttgataaccaaccaggaaaacccaatccagttaaagtgtgaggacttaagttctgatagtgttgtggttgatctcagtaacggtttaaaggatacagtttcagtgaaagaaaaatttacatctttatgtgaaaggagcagaaatcacctagcaagcacggagaaggacactcaagaaactctgtctgatgctgaaaggaggaagaatgatgcagctgttgcgctttcggatcaaaggcttttctcttgtgttacatgtggagtcttaagctttgattgtgtagctatcgttcaacctaaagaagcagctgctagatatctcatgtctgcagattgtagcttcttcaatgattggacagctgcttctggatctgcaaatcttggtcaggctgcaagatcacttcatcctcaaagcaaagagaagcatgatgtaaattacttctacaatgttcctgttcaaactatggatcattcagtgaagactggcgatcaaaaaacttcaacaacttccccgacaatagcgcataaagataatgatgttcttgggatgttagcttcagcatatggagactcttctgattccgaggaagaagatcaaaaaggcttagttacccctagttccaaaggggaaacaaaaacgtatgatcaagaaggttcagatggccatgaggaggctagagatggtagaacttctgattttaactgccagagactaaccagcgaacagaatgggttaagcaaaggcggaaaatcatcacttctggaaatagctttaccatttattccaagatctgatgacgattcatgtcggttgcacgtgttttgtcttgagcatgctgcggaagtggaacagcaacttcgtccttttggggggattaacttaatgttactgtgccatccagagtaccccaggatagaggctgaagcaaagatagttgccgaagagctcgtcatcaatcacgaatggaatgatactgaattcaggaatgtgacccgagaggatgaggaaacgattcaggcagcgttggataatgttgaagctaagggtgggaacagtgattggaccgtaaaattgggtgttaacctttcttacagcgctattctcagtcgctctcctctgtacagtaagcagatgccgtataactccatcatatacaaggcgttcggtcgcagctctccagtagcgagctcaccctcgaaacccaaagtctctggtaaaagatcgtccagacagaggaaatatgttgttggaaaatggtgtggtaaggtttggatgtcacatcaggtgcatccctttttgctggagcaggacttagagggggaagaatctgaaagaagttgtcatcttcgagttgctatggatgaggatgccactggaaagagatcgtttcctaataatgtttccagggattcgacaacaatgtttggaagaaagtattgtaggaagagaaagataagagcaaaggcggtgccacgcaagaagcttacttcttttaagagggaagatggagtttctgatgacacatcagaagatcattcttataagcagcaatggagggcttccgggaatgaggaagagtcttattttgagacagggaacacagcttctggtgattcatcaaatcaaatgtctgatccgcacaagggaattatcagacataaaggttataaagaatttgagtcagatgatgaggtttcagaccgttcacttggggaagagtatactgtacgggcatgtgcagcttcagagagctcaatggagaatggctctcagcattcaatgtatgaccatgatgatgatgatgatgatatcgacaggcagcctagggggattccaaggagccaacagacaagagtttttaggaatccagtttcatatgagtcagaagataatggcgtttatcagcaaagcggaagaatatccataagtaataggcaagctaatcgaatggttggtgaatatgattcagcagagaattctttggaggaacgaggcttttgcagtacagggaaaaggcaaaccaggtcaacagccaaacgaatagcaaaaaccaagacagttcagagttcgagagacacaaaaggtcgctttttgcaagaatttgcatctggaaagaagaatgaagaattggattcatacatggagggacctagcacacggcttagggtgagacatcagaagccgtcgagagggtctttagaaacaaaaccaaagaagattggtaagaagagaagtggtaatgcttccttctccagagttgcaactgaaaaagatgtggaggaaaaagaagaagaagaagaagaagaagagaatgaggaagaggaatgtgcagcataccaatgtaacatggagggttgcacgatgagtttcagttcggaaaaacagttgatgttacacaaaagaaacatatgcccaattaaaggctgtggtaaaaacttcttctcacacaagtatttggttcaacaccagcgtgttcactcagacgaccgtcctctgaaatgtccatggaagggatgtaagatgacgttcaagtgggcttggtctagaaccgagcacataagggttcacacaggcgctaggccttatgtttgcgctgaaccggattgtggtcaaacattcaggtttgtctctgacttcagccggcataaaaggaagaccggtcattcggttaagaagaccaacaaaaggtga

SEQ ID NO: 120 - protein, 1360 aa, Arabidopsis thaliana
MAVSEQSQDVFPWLKSLPVAPEFRPTLAEFQDPIAYILKIEEEASRYGICKILPPLPPPSKKTSISNLNRSLAARAAARVRDGGFGACDYDGGPTFATRQQQIGFCPRKQRPVQRPVWQSGEEYSFGEFEFKAKNFEKNYLKKCGKKSQLSALEIETLYWRATVDKPFSVEYANDMPGSAFIPLSLAAARRRESGGEGGTVGETAWNMRAMSRAEGSLLKFMKEEIPGVTSPMVYVAMMFSWFAWHVEDHDLHSLNYLHMGAGKTWYGVPKDAALAFEEVVRVHGYGEELNPLVTFSTLGEKTTVMSPEVFVKAGIPCCRLVQNPGEFVVTFPGAYHSGFSHGFNFGEASNIATPEWLRMAKDAAIRRAAINYPPMVSHLQLLYDFVLALGSRVPTSINPKPRSSRLKDKARSEGERLTKKLFVQNIIHNNELLSSLGKGSPVALLPQSSSDISVCSDLRIGSHLITNQENPIQLKCEDLSSDSVVVDLSNGLKDTVSVKEKFTSLCERSRNHLASTEKDTQETLSDAERRKNDAAVALSDQRLFSCVTCGVLSFDCVAIVQPKEAAARYLMSADCSFFNDWTAASGSANLGQAARSLHPQSKEKHDVNYFYNVPVQTMDHSVKTGDQKTSTTSPTIAHKDNDVLGMLASAYGDSSDSEEEDQKGLVTPSSKGETKTYDQEGSDGHEEARDGRTSDFNCQRLTSEQNGLSKGGKSSLLEIALPFIPRSDDDSCRLHVFCLEHAAEVEQQLRPFGGINLMLLCHPEYPRIEAEAKIVAEELVINHEWNDTEFRNVTREDEETIQAALDNVEAKGGNSDWTVKLGVNLSYSAILSRSPLYSKQMPYNSIIYKAFGRSSPVASSPSKPKVSGKRSSRQRKYVVGKWCGKVWMSHQVHPFLLEQDLEGEESERSCHLRVAMDEDATGKRSFPNNVSRDSTTMFGRKYCRKRKIRAKAVPRKKLTSFKREDGVSDDTSEDHSYKQQWRASGNEEESYFETGNTASGDSSNQMSDPHKGIIRHKGYKEFESDDEVSDRSLGEEYTVRACAASESSMENGSQHSMYDHDDDDDDIDRQPRGIPRSQQTRVFRNPVSYESEDNGVYQQSGRISISNRQANRMVGEYDSAENSLEERGFCSTGKRQTRSTAKRIAKTKTVQSSRDTKGRFLQEFASGKKNEELDSYMEGPSTRLRVRHQKPSRGSLETKPKKIGKKRSGNASFSRVATEKDVEEKEEEEEEEENEEEECAAYQCNMEGCTMSFSSEKQLMLHKRNICPIKGCGKNFFSHKYLVQHQRVHSDDRPLKCPWKGCKMTFKWAWSRTEHIRVHTGARPYVCAEPDCGQTFRFVSDFSRHKRKTGHSVKKTNKR

SEQ ID NO: 121 - DNA, 2523 bp, Arabidopsis thaliana
atggagaaaatgagagggaagcgaatcagaccaagagattccggcgagttagtcgaagatgggagatctgaaagcgagcgtaagacgaggaagaaagagaatgatgttgtgagcaaaggaagaatcggaagaggaagaggaagaggagaggtttcgaagcgatctattgaaatagacatttctaatcccgagaaggatattaagcctgacggaagcagaaagtgtttgggttcgacgtgtcatcattgtaagatcttgacgagtgagagtgatcttatcttctgttcaaagtgtaacaagaagtgttattgctttgactgcatcaagagatcgtattcagaaagaacacatgaggaagttagagctgcttgtccattctgtatgatgacttgcatttgcagagcttgtttgcggttgcctttggttatcaagcctccaagtgaaaaagatacagatgtcaagcttaagcagctgcagtatctgttagtcaaagttctcccagttcttaaggatatttatacggagcagaaccgtgaactagagattgaatcaacaattagaggacaccctgtgacagaagctaatatcaagaggtgcaaacttgacccaagcgaacgcatatactgtgatctctgccgcacatccattgccaattttcacagaagctgtccgaacaaaaattgttcagtcgatatatgtctttcttgctgcaaggaactaagtgagggcttccatcaagagagagatgggaagaaaaatgcagaagggaaaggatatgaatgtcgaatcccagcaggtcaaggaaaagactcggacgcatatgttccactgcatttctcgacttggaagcttaactcagacagtagcattccatgccctccaaaagagtgtggtggttgtggtacttcaacactggagttgagacgcttatggaaaagagattgggttgaaaaattaataacgaatgccgagaaatgtactctgaattttaggccaacagatgtggatattgttcatgaatgttcctcatgctctaccaattctgattccattagaaggcaggcagcttttaggaagaatgctcatgataatttcttatactccccaaatgctgttgatctggctgaagacgatattgctcattttcagtttcattggatgaaggcagaacctgtgatagtcagaaatgttctcgagaagacatctggactaagttgggaaccaatggttatgtggagggcttgtagggaaatggatccaaagcgtaaaggtacagaagaagagacaacaaaagtgaaagctttggattgcttggactggtgtgaggttgaaataaatctgcatcagttttttgagggctacttagaaggccgcatgcataaaaacggttggccagaaatgttgaaattgaaggactggcctccctcagatttatttgaaaagcgccttccaaggcataatgctgagtttattgccgcattgcctttctttgattacactgacccaaagtctggtatcctaaatctcgcaacaagatttccggaaggatccttgaagccagatcttggacccaagacatacattgcgtacggtttccatgaagagcttaatagaggagattcggtgacaaaacttcattgtgacatttctgacgcggtcaatgtgttgacacacacagctaaagtggaaatccctcccgtcaaataccaaaacataaaagtacatcagaaaaaatatgcagaagccatgttgcagaaacaacaatacagtggtcaagtgaaagaagccagcgaacttgaaaacaagtcaatgaaagaagtggatgaaagtaaaaaggatttaaaagacaaggcagctaacgaagaacaatcaaataacagttcaagaccgtcgggctcaggagaagctgagaaagtaattatttcaaaagaggataatcccacacaacctgctgtgagtacaagtgtggaatccatacaagaacagaagctggatgctccaaaagaaactgatggcaataccaatgagaggtcaaaggctgtgcatggtggtgctgtctgggatatctttcgaagagaggatgttccaaaacttattcagtttttgaaaaggcacgagcatgagtttcgtcacttcaataacgaacccctggaatccgttattcacccaattcatgaccagactatgttcttgagtgatagccagaagaaacagctgaaagaagaatttgatatagaaccatggacctttgagcaacacctcggcgaagcagtcttcatacctgcaggttgtcctcaccaagtgaggaatagacagtcttgcataaaggtggcactagactttgtggctcctgaaagcgtcgaagaatgccttaggctaacacaggagttccggagattgcctaaagaccacagttctagcgaggataaattggagcttaagaaaattgcactgtatgctgcgagttcagccataagagaggtaaaagggctaatgcaaagctcccgacgcagtgatacctaa

SEQ ID NO: 122 - protein, 840 aa, Arabidopsis thaliana
MEKMRGKRIRPRDSGELVEDGRSESERKTRKKENDVVSKGRIGRGRGRGEVSKRSIEIDISNPEKDIKPDGSRKCLGSTCHHCKILTSESDLIFCSKCNKKCYCFDCIKRSYSERTHEEVRAACPFCMMTCICRACLRLPLVIKPPSEKDTDVKLKQLQYLLVKVLPVLKDIYTEQNRELEIESTIRGHPVTEANIKRCKLDPSERIYCDLCRTSIANFHRSCPNKNCSVDICLSCCKELSEGFHQERDGKKNAEGKGYECRIPAGQGKDSDAYVPLHFSTWKLNSDSSIPCPPKECGGCGTSTLELRRLWKRDWVEKLITNAEKCTLNFRPTDVDIVHECSSCSTNSDSIRRQAAFRKNAHDNFLYSPNAVDLAEDDIAHFQFHWMKAEPVIVRNVLEKTSGLSWEPMVMWRACREMDPKRKGTEEETTKVKALDCLDWCEVEINLHQFFEGYLEGRMHKNGWPEMLKLKDWPPSDLFEKRLPRHNAEFIAALPFFDYTDPKSGILNLATRFPEGSLKPDLGPKTYIAYGFHEELNRGDSVTKLHCDISDAVNVLTHTAKVEIPPVKYQNIKVHQKKYAEAMLQKQQYSGQVKEASELENKSMKEVDESKKDLKDKAANEEQSNNSSRPSGSGEAEKVIISKEDNPTQPAVSTSVESIQEQKLDAPKETDGNTNERSKAVHGGAVWDIFRREDVPKLIQFLKRHEHEFRHFNNEPLESVIHPIHDQTMFLSDSQKKQLKEEFDIEPWTFEQHLGEAVFIPAGCPHQVRNRQSCIKVALDFVAPESVEECLRLTQEFRRLPKDHSSSEDKLELKKIALYAASSAIREVKGLMQSSRRSDT

SEQ ID NO: 123 - DNA, 2865 bp, Arabidopsis thaliana
atggatcagcttgcatctctagcagagtctgtggctatggaggaagattctgagaaacaatcgattaaaggagagagtagtcttgaacctgactctactccttctagtcctaaaataactgctaggtggaatccatcagaagcttgcaggcctttggttgatgacgctcccatcttttatcccactaatgaggattttgatgatccacttggttacatagagaagttgcgctctaaagcagaatcatatggcatatgtcgaattgtgccgcctgttgcatggaggcccccttgccctctgaaggagaaaaaaatatgggagaattctaaatttcccacccggattcagttcattgacttgcttcaaaaccgagaaccgattaaaaaatctactaaaaccaagaagagaaaacggagaagaatctctaaaattggatacacaagaagaaaaagagattcaggctgtgatacggcttcctctggctctagtgatagtgaaggaaaatttggttttcagactgggccagattttaccctggaagaatttcagaagtatgatgaatactttaaggaatgctattttcagtcagaggatcatcctggttccaaagcgtctgaaaataagaaatttaaacctaaggttaaggaccttgaaggtgaatattggcggatagtggagcaggcaactgatgaagtagaggtgtactatggagctgacttggaaacaaagaaatttggaagtggtttcccaaagtataaaccggggtatcctataagtgaagcagatcaatactctcaatgtggttggaacctaaataatttgtcccgtctgcccggatcagttctagcttttgagagctgcgatatctcaggagtcattgtgccatggctttatgttggaatgtgcttttcaactttttgttggcatgttgaagatcatcacctttattccatgaactacttacacacaggtgatccaaaagtttggtatgggatccctggaaaccatgctgagtcttttgaaaatgtaatgaaaaagcgtcttccagatttgtttgaagaacagcctgacttgctacatcaactggtcactcagttatctccaagaatcttaaaagaggagggagtacctgtctatcgagctgtccagcgcagtggagaattcattctaaccttccctaaggcctatcattctgggtttaattgtggtttcaactgtgcggaagcagtaaatgttgcaccagttgattggctggttcatggacagaatgcagtggaaggctatagcaagcagcggcgaaagagttcattgtcacatgacaagctgcttcttggagctgctatggaagctacttattgcctctgggagctttcactttcaaagaagaagactcctgtgattgcgagatggaaaagggtttgtagtgaggatggattgcttacgaaggcagtcaagaagcgtgtgcagatggaagaagaaagactaaatcaccttcaagatggttttagcttgcgaaagatggagggtgatttcgacaataagagagaacgggagtgcttcttgtgcttctatgatttgcatatgtctgcttcaagctgcaagtgttcccccaaccggtttgcatgtcttatccacgctaaggatctgtgttcatgtgaaagtaaggatagatatatcctaattcgccacaccttggatgagttatgggcactggtcagagctctagaaggggatcttgatgccatagacctatgggcaagtaaatgtcgtgaccagtatccttcacagcatccaagagcaagagaatatgcttacctcaagtctgccccatgtataaagagccgtggttcatcaaaagtacagcagcgagaacaaaacaatcttcagttagtgtctgaacgcttacaaagtgatctaacctcaaacaaggaagttcagttgaaacaagatggtgattcagatgtaaatcgccatggtcatgaaagcgaaagaaatcatgtacatgggatcactgataagtcagctgtcacggatgtaaaacttggtgtgggaggtaagtttgatgagaagaagatttcggttgaatctcaaaacccacattcagtttcagatgtagggtgtagcgagctggcgaagaaagtggatggttgtttaggagggaaggaccaaaatgctgcaaccaataggttaagtctctctgttgagcttttgagttctggatctctcgttgttaaaaagctgtggtgcagtaaacaggccatatacccaaaagggttcaagagccgtgttaagttcttaagtgtgcttgacccaacaaacctaaccaactacatctcagaggttctggatgcagggcttcttggtccattgttcagggtctcagtagaagattaccccactgagaatttctcgaatgtatctgctgaaaagtgctggcaaatggtgacacaaaggctcaaactcgaaatcatcaagaaatgtgatcaaccagttagctctttgacctctttacaacctttggagagtataaatgggcttgaaatgtttggatttctctccccgcacgtaattaaggtggttgaggctcttgatccaaagcatcaattggaggagtattggaaccaaaaagcagtgaaactgtttggtgctgaaccaataaaggaaggagaaaaggatgatacagagaaaggaggggcttcagatccctctttggaccgggacacaaggcttctgcgtggactgttgaagaaggcgacacctgaagaattagtaatgatgcatggacttctgtgtggtgagactcgcaacaccgagctcaaggaagagctctctactttggttgataagatggagataagtccttaa

SEQ ID NO: 124 - protein, 954 aa, Arabidopsis thaliana
MDQLASLAESVAMEEDSEKQSIKGESSLEPDSTPSSPKITARWNPSEACRPLVDDAPIFYPTNEDFDDPLGYIEKLRSKAESYGICRIVPPVAWRPPCPLKEKKIWENSKFPTRIQFIDLLQNREPIKKSTKTKKRKRRRISKIGYTRRKRDSGCDTASSGSSDSEGKFGFQTGPDFTLEEFQKYDEYFKECYFQSEDHPGSKASENKKFKPKVKDLEGEYWRIVEQATDEVEVYYGADLETKKFGSGFPKYKPGYPISEADQYSQCGWNLNNLSRLPGSVLAFESCDISGVIVPWLYVGMCFSTFCWHVEDHHLYSMNYLHTGDPKVWYGIPGNHAESFENVMKKRLPDLFEEQPDLLHQLVTQLSPRILKEEGVPVYRAVQRSGEFILTFPKAYHSGFNCGFNCAEAVNVAPVDWLVHGQNAVEGYSKQRRKSSLSHDKLLLGAAMEATYCLWELSLSKKKTPVIARWKRVCSEDGLLTKAVKKRVQMEEERLNHLQDGFSLRKMEGDFDNKRERECFLCFYDLHMSASSCKCSPNRFACLIHAKDLCSCESKDRYILIRHTLDELWALVRALEGDLDAIDLWASKCRDQYPSQHPRAREYAYLKSAPCIKSRGSSKVQQREQNNLQLVSERLQSDLTSNKEVQLKQDGDSDVNRHGHESERNHVHGITDKSAVTDVKLGVGGKFDEKKISVESQNPHSVSDVGCSELAKKVDGCLGGKDQNAATNRLSLSVELLSSGSLVVKKLWCSKQAIYPKGFKSRVKFLSVLDPTNLTNYISEVLDAGLLGPLFRVSVEDYPTENFSNVSAEKCWQMVTQRLKLEIIKKCDQPVSSLTSLQPLESINGLEMFGFLSPHVIKVVEALDPKHQLEEYWNQKAVKLFGAEPIKEGEKDDTEKGGASDPSLDRDTRLLRGLLKKATPEELVMMHGLLCGETRNTELKEELSTLVDKMEISP

SEQ ID NO: 125 - DNA, 2694 bp, Arabidopsis thaliana
atgatactgcttcatggtcaggattttgatgatccacttggttacatagagaagttgcgctctaaagcagaatcatatggcatatgtcgaattgtgccgcctgttgcatggaggcccccttgccctctgaaggagaaaaaaatatgggagaattctaaatttcccacccggattcagttcattgacttgcttcaaaaccgagaaccgattaaaaaatctactaaaaccaagaagagaaaacggagaagaatctctaaaattggatacacaagaagaaaaagagattcaggctgtgatacggcttcctctggctctagtgatagtgaaggaaaatttggttttcagactgggccagattttaccctggaagaatttcagaagtatgatgaatactttaaggaatgctattttcagtcagaggatcatcctggttccaaagcgtctgaaaataagaaatttaaacctaaggttaaggaccttgaaggtgaatattggcggatagtggagcaggcaactgatgaagtagaggtgtactatggagctgacttggaaacaaagaaatttggaagtggtttcccaaagtataaaccggggtatcctataagtgaagcagatcaatactctcaatgtggttggaacctaaataatttgtcccgtctgcccggatcagttctagcttttgagagctgcgatatctcaggagtcattgtgccatggctttatgttggaatgtgcttttcaactttttgttggcatgttgaagatcatcacctttattccatgaactacttacacacaggtgatccaaaagtttggtatgggatccctggaaaccatgctgagtcttttgaaaatgtaatgaaaaagcgtcttccagatttgtttgaagaacagcctgacttgctacatcaactggtcactcagttatctccaagaatcttaaaagaggagggagtacctgtctatcgagctgtccagcgcagtggagaattcattctaaccttccctaaggcctatcattctgggtttaattgtggtttcaactgtgcggaagcagtaaatgttgcaccagttgattggctggttcatggacagaatgcagtggaaggctatagcaagcagcggcgaaagagttcattgtcacatgacaagctgcttcttggagctgctatggaagctacttattgcctctgggagctttcactttcaaagaagaagactcctgtgattgcgagatggaaaagggtttgtagtgaggatggattgcttacgaaggcagtcaagaagcgtgtgcagatggaagaagaaagactaaatcaccttcaagatggttttagcttgcgaaagatggagggtgatttcgacaataagagagaacgggagtgcttcttgtgcttctatgatttgcatatgtctgcttcaagctgcaagtgttcccccaaccggtttgcatgtcttatccacgctaaggatctgtgttcatgtgaaagtaaggatagatatatcctaattcgccacaccttggatgagttatgggcactggtcagagctctagaaggggatcttgatgccatagacctatgggcaagtaaatgtcgtgaccagtatccttcacagcatccaagagcaagagaatatgcttacctcaagtctgccccatgtataaagagccgtggttcatcaaaagtacagcagcgagaacaaaacaatcttcagttagtgtctgaacgcttacaaagtgatctaacctcaaacaaggaagttcagttgaaacaagatggtgattcagatgtaaatcgccatggtcatgaaagcgaaagaaatcatgtacatgggatcactgataagtcagctgtcacggatgtaaaacttggtgtgggaggtaagtttgatgagaagaagatttcggttgaatctcaaaacccacattcagtttcagatgtagggtgtagcgagctggcgaagaaagtggatggttgtttaggagggaaggaccaaaatgctgcaaccaataggttaagtctctctgttgagcttttgagttctggatctctcgttgttaaaaagctgtggtgcagtaaacaggccatatacccaaaagggttcaagagccgtgttaagttcttaagtgtgcttgacccaacaaacctaaccaactacatctcagaggttctggatgcagggcttcttggtccattgttcagggtctcagtagaagattaccccactgagaatttctcgaatgtatctgctgaaaagtgctggcaaatggtgacacaaaggctcaaactcgaaatcatcaagaaatgtgatcaaccagttagctctttgacctctttacaacctttggagagtataaatgggcttgaaatgtttggatttctctccccgcacgtaattaaggtggttgaggctcttgatccaaagcatcaattggaggagtattggaaccaaaaagcagtgaaactgtttggtgctgaaccaataaaggaaggagaaaaggatgatacagagaaaggaggggcttcagatccctctttggaccgggacacaaggcttctgcgtggactgttgaagaaggcgacacctgaagaattagtaatgatgcatggacttctgtgtggtgagactcgcaacaccgagctcaaggaagagctctctactttggttgataagatggagataagtccttaa

SEQ ID NO: 126 - protein, 897 aa, Arabidopsis thaliana
MILLHGQDFDDPLGYIEKLRSKAESYGICRIVPPVAWRPPCPLKEKKIWENSKFPTRIQFIDLLQNREPIKKSTKTKKRKRRRISKIGYTRRKRDSGCDTASSGSSDSEGKFGFQTGPDFTLEEFQKYDEYFKECYFQSEDHPGSKASENKKFKPKVKDLEGEYWRIVEQATDEVEVYYGADLETKKFGSGFPKYKPGYPISEADQYSQCGWNLNNLSRLPGSVLAFESCDISGVIVPWLYVGMCFSTFCWHVEDHHLYSMNYLHTGDPKVWYGIPGNHAESFENVMKKRLPDLFEEQPDLLHQLVTQLSPRILKEEGVPVYRAVQRSGEFILTFPKAYHSGFNCGFNCAEAVNVAPVDWLVHGQNAVEGYSKQRRKSSLSHDKLLLGAAMEATYCLWELSLSKKKTPVIARWKRVCSEDGLLTKAVKKRVQMEEERLNHLQDGFSLRKMEGDFDNKRERECFLCFYDLHMSASSCKCSPNRFACLIHAKDLCSCESKDRYILIRHTLDELWALVRALEGDLDAIDLWASKCRDQYPSQHPRAREYAYLKSAPCIKSRGSSKVQQREQNNLQLVSERLQSDLTSNKEVQLKQDGDSDVNRHGHESERNHVHGITDKSAVTDVKLGVGGKFDEKKISVESQNPHSVSDVGCSELAKKVDGCLGGKDQNAATNRLSLSVELLSSGSLVVKKLWCSKQAIYPKGFKSRVKFLSVLDPTNLTNYISEVLDAGLLGPLFRVSVEDYPTENFSNVSAEKCWQMVTQRLKLEIIKKCDQPVSSLTSLQPLESINGLEMFGFLSPHVIKVVEALDPKHQLEEYWNQKAVKLFGAEPIKEGEKDDTEKGGASDPSLDRDTRLLRGLLKKATPEELVMMHGLLCGETRNTELKEELSTLVDKMEISP

SEQ ID NO: 127 - DNA, 4023 bp, Arabidopsis thaliana
atgggtaatgttgaaattccgaattggcttaaagctttgccattggcacctgtgtttagacctacagacactgaatttgcagatcccattgcttacatatcgaaaatcgaaaaggaagctagtgcctttgggatttgcaagatcattcctcctttacccaagccatcgaaaaagtatgttttctacaacttgaacaagtctcttttgaagtgtcccgaattggtttcagatgttgacatttcgaaggtgtgtaaagaggatagagctgtattcaccactaggcagcaagagttaggccaaactgtgaaaaaaaacaaaggagagaagggtaagagtaattctcaaaggagtggtgttaagcaggtttggcaaagtggaggcgtttatacattggatcagtttgaagctaagtcgaaagctttctacaaaacccaattaggaacggttaaggaactggcaccagttgtcattgaggcattgttctggaaagcggctttagagaagcctatatatatagagtatgctaatgacgtgcctggctctgctttcggtgagccagaggatcatttcaggcatttccggcagaggaagaggaggggcaggggattttatcagaggaagacagaaaataatgatccatcaggtaagaacggtgaaaagtcatcgcctgaggtagaaaaggcaccccttgcttctacaagtttatcatctcaggattcgtccaagcagaagaacatggatattgttgatgaaatggaaggtactgcaggctggaagctctccaacagttcgtggaaccttcagatgattgcacgttcacctggttctgttacacgtttcatgccagatgacattcctggtgttacatctcccatggtttatatcggtatgttgttcagttggtttgcctggcacgttgaggatcatgagcttcacagtatgaattatcttcacactggctcaccaaagacttggtacgctgtcccttgtgattatgcgcttgactttgaagaggttatccgcaaaaattcttatggcaggaacattgaccaactggctgctctcacccaactaggcgaaaagacaactcttgtatcacctgagatgatagttgcatctggcattccctgctgtaggttggtacaaaatcctggtgaatttgttgtgacttttccgaggtcttatcatgtaggattcagccacggttttaactgtggggaagccgctaattttggaaccccacagtggctcaacgtagcaaaggaagctgctgtgcgtcgggcagccatgaattatctacccatgctgtcccatcagcagctgctatatctcttgactatgtcctttgtttcaagagtgccacgatcattgctaccaggtggtcgtagctcccgactaagagatcggcagagagaagaaagagagttccttgtgaaaagagcttttgtagaagatatattgaacgaaaacaagaatttatctgttcttcttcgagaaccaggctctcgtttggtgatgtgggaccctgatttacttccgcgtcatagcgcactggctcttgcagctgctggagttgctggtgcttctgctgtttcacctccagcagtggcaaaaaaagaacttgaggagggtcattctgaattgcagaataaagaaaagacttctcttttagaggaattgagcttgttcatggagaagctgaatgatgtatactacgacgatgatgatggtctgcttaacgatttccaagttgatactggaaccttgccatgtgtggcttgtggcgttcttggcttcccctttatgtctgtggtacagccttctgaaaaagcattaaaagatctctcagagagacaaggagagacagatgctcaggaaattatgacactgtcatcagaaaagtctgactgcgaatggaaaacgtcttctagatatataagacctcgcattttctgcctcgaacacactattgaacttcagagactgctgcaatcaagaggtggattgaaattccttgttatttgccataaagactttcaaaaattcaaggcacatgcggctatagtggcagaggaggtcaaagtccctttcagctatgatgatgtcctgttagagagtgcatctcaggaagagttgagtctaattgatcttgcaattgaagatgaagaaaaatacgaacacagtgtagactggacctcagaacttggcatcaatttacggtactgtgtgaaagtgaggaaaaattcccctactaagaaaattcagcatgcactgtcactaggtggcttgttctccgatacaagccagatgctagattttacaactatcagatggctgcagagaaaatcacgctcaaaagctaaacccagttctacctcaagtttcacaccttgtgaacatcttgaagtaaaagcagatggaaaattaagggataatttggattctcagaccggaaaaaaggaagaaaagatcatccagtactcgagaaagaaaaagttgaatccaaagccttcagcagaacaagttcaggagctagctaccctagctaaatcaaaagattttgataagacatgtaaaaattttagcagtaggtcacatctggatagtgcaattcgttctgagatgaacagtgagattggagactctggaagggtcattggggtatcattttccataaatccttgtagctcatctttcactgtgggacatgggcaagaacatcccgagatcactgtcaagtttggttcagatttagatgggaatgtcacaaatagtttgagtatggtgaatggagactctgctgacctaaccttaacctccatatccagagagcagcaccaaggacactctatgaccagcaataataatggctccaactcaggtagtcatgttgtggcaagccagaccatacttgtttctacaggtgataatcatgacggaccaagaaaattgtctggtgattatgtctgcagtgatgtgtctgtacgtggtattcaggaagcggttgaaatgagtgaccaagagtttggagaacctaggtctactgtcactaatattgaggatgaacagcaatcacagattgtgaaaccaacccaaagagaagctgtatttggtgatcacgaacaggtggagggagcagaagctgtgtctaccagagaaaacttgtgctctgaaataattctgcacactgagcattcttcagctcatgtgggtatggaaattcctgacataaacacggccagtgagaacttagttgttgacatgacccatgatggtgaacctttggaaagtagcgatatattaagttcgagcaatggtgatgaagcttcttcaaatggattgcaagttctaaatgatgagcttagcatggagagtgaagtttcaagctcagaaaacaccgaagttattgaggctcccaattctatgggagaagcaaagaagaagcggaaaatagaatcagagtctgagacaaatgataatccagagagtagcattggtttcataaggagtccttgtgaagggttgaggtcaaggggcaagaggaaagcaacatgtgaaacttcattaaagcacactgaaacgagtgatgaagagaagaaacccattgcgaaaaggctgaagaaaacaccaaaggcttgctcagggagtcgtcagcaagaagtccccacgacaactcaccccaaccgttgttacctagagggatgcaagatgacttttgagagtaaagcgaaattacaaactcacaagagaaaccgttgcactcacgaagggtgtggaaagaaattcagggctcacaaatatctggtgcttcatcaacgtgtgcataaggatgaaagacctttcgagtgctcttggaaaggatgttcaatgactttcaaatggcaatgggcgaggacagaacatttgcgtctgcacacgggagagcgaccatacatatgcaaggtcgatggatgtggattgtcgtttaggtttgtatctgactatagtcgccacagacgtaaaaccatgcactatgtcacatag

SEQ ID NO: 128 - protein, 1340 aa, Arabidopsis thaliana
MGNVEIPNWLKALPLAPVFRPTDTEFADPIAYISKIEKEASAFGICKIIPPLPKPSKKYVFYNLNKSLLKCPELVSDVDISKVCKEDRAVFTTRQQELGQTVKKNKGEKGKSNSQRSGVKQVWQSGGVYTLDQFEAKSKAFYKTQLGTVKELAPVVIEALFWKAALEKPIYIEYANDVPGSAFGEPEDHFRHFRQRKRRGRGFYQRKTENNDPSGKNGEKSSPEVEKAPLASTSLSSQDSSKQKNMDIVDEMEGTAGWKLSNSSWNLQMIARSPGSVTRFMPDDIPGVTSPMVYIGMLFSWFAWHVEDHELHSMNYLHTGSPKTWYAVPCDYALDFEEVIRKNSYGRNIDQLAALTQLGEKTTLVSPEMIVASGIPCCRLVQNPGEFVVTFPRSYHVGFSHGFNCGEAANFGTPQWLNVAKEAAVRRAAMNYLPMLSHQQLLYLLTMSFVSRVPRSLLPGGRSSRLRDRQREEREFLVKRAFVEDILNENKNLSVLLREPGSRLVMWDPDLLPRHSALALAAAGVAGASAVSPPAVAKKELEEGHSELQNKEKTSLLEELSLFMEKLNDVYYDDDDGLLNDFQVDTGTLPCVACGVLGFPFMSVVQPSEKALKDLSERQGETDAQEIMTLSSEKSDCEWKTSSRYIRPRIFCLEHTIELQRLLQSRGGLKFLVICHKDFQKFKAHAAIVAEEVKVPFSYDDVLLESASQEELSLIDLAIEDEEKYEHSVDWTSELGINLRYCVKVRKNSPTKKIQHALSLGGLFSDTSQMLDFTTIRWLQRKSRSKAKPSSTSSFTPCEHLEVKADGKLRDNLDSQTGKKEEKIIQYSRKKKLNPKPSAEQVQELATLAKSKDFDKTCKNFSSRSHLDSAIRSEMNSEIGDSGRVIGVSFSINPCSSSFTVGHGQEHPEITVKFGSDLDGNVTNSLSMVNGDSADLTLTSISREQHQGHSMTSNNNGSNSGSHVVASQTILVSTGDNHDGPRKLSGDYVCSDVSVRGIQEAVEMSDQEFGEPRSTVTNIEDEQQSQIVKPTQREAVFGDHEQVEGAEAVSTRENLCSEIILHTEHSSAHVGMEIPDINTASENLVVDMTHDGEPLESSDILSSSNGDEASSNGLQVLNDELSMESEVSSSENTEVIEAPNSMGEAKKKRKIESESETNDNPESSIGFIRSPCEGLRSRGKRKATCETSLKHTETSDEEKKPIAKRLKKTPKACSGSRQQEVPTTTHPNRCYLEGCKMTFESKAKLQTHKRNRCTHEGCGKKFRAHKYLVLHQRVHKDERPFECSWKGCSMTFKWQWARTEHLRLHTGERPYICKVDGCGLSFRFVSDYSRHRRKTMHYVT

SEQ ID NO: 129 - DNA, 1509 bp, Arabidopsis thaliana
atgccaaagtgcaagaatctgttgctaacctcgaagcgacgtaaatccaaatccaaaagactaaagctccatcagcatgaacctgagtctctgtttccagagaaggaggtagaagaggaagatgaagatgaaggaggcttcaagctgaaaattgcagctccttctcaagagcatggagttcaacctctgggaaacctatatttcaatcctggtgcggtcaatgtgcgaaacactggattaggtaatctccagatactctcagatgagctcgttttggatattctaggtcttcttggcgccaatcatttgggtgttttggctactgtaactaagtcattctatatatttgctaatcatgagcctctctggagaaatcttgtgttagaggagttaaaaggagattttttgtttaatgggtcgtggagatctacctatgtagctgcttaccatccgaaattcaagtttgctggagatggtgaatcgaatttgaagattatagatttctattctgattatctgtttcagagctggttatgtgcgaatcttgaaatgaaaccgaaatggcttagaagagataatatcacacgggtgagaggcatttctgttgaagacttcattacaaagtttgaggagccgaataagccagttttgttggagggatgtttggatggttggcctgctattgagaaatggtcaagagattatctgactaaggtggttggtgatgtcgaattcgcggtaggtccagtggaaatgaagctcgagaagtattttaggtattctgatggagctagggaagaaaggcctttgtacttgtttgatccaaagtttgcagagaaagttccggttttggattcggagtatgatgttcctgtctatttcagagaggacttgtttggtgttttaggaaacgagcgacctgattatagatggatcataattggtccagccggatcaggatcgtctttccatattgatcctaactcaacatcagcttggaatgcggtgatcacagggtcgaagaaatgggttttgttcccacctgatgtggttcctccgggtgtgcatccaagtcctgatggagcagaagtggcctgtcctgtttccataatagaatggttcatgaacttttatgatgatactaaggattgggagaagaaacctattgagtgtatatgcaaagccggggaggtgatgtttgtacctaatggatggtggcatctggtgattaacctggaggaatcgattgctattactcagaattatgctagcaggagtaatttgttgaatgtgttagaatttctgaagaaaccaaatgctaaagaacttgtctccgggacaactgacagagagaatttgcatgacaaattcaagaaagccattgaagaagcttacccggggactatccaagagttagaaaagaaagcagaagaagcaaaaagagccgaagaacaaagagtttctttctgggactctgccaaaactgatactttcaagttttctttctaa

SEQ ID NO: 130 - protein, 502 aa, Arabidopsis thaliana
MPKCKNLLLTSKRRKSKSKRLKLHQHEPESLFPEKEVEEEDEDEGGFKLKIAAPSQEHGVQPLGNLYFNPGAVNVRNTGLGNLQILSDELVLDILGLLGANHLGVLATVTKSFYIFANHEPLWRNLVLEELKGDFLFNGSWRSTYVAAYHPKFKFAGDGESNLKIIDFYSDYLFQSWLCANLEMKPKWLRRDNITRVRGISVEDFITKFEEPNKPVLLEGCLDGWPAIEKWSRDYLTKVVGDVEFAVGPVEMKLEKYFRYSDGAREERPLYLFDPKFAEKVPVLDSEYDVPVYFREDLFGVLGNERPDYRWIIIGPAGSGSSFHIDPNSTSAWNAVITGSKKWVLFPPDVVPPGVHPSPDGAEVACPVSIIEWFMNFYDDTKDWEKKPIECICKAGEVMFVPNGWWHLVINLEESIAITQNYASRSNLLNVLEFLKKPNAKELVSGTTDRENLHDKFKKAIEEAYPGTIQELEKKAEEAKRAEEQRVSFWDSAKTDTFKFSF

SEQ ID NO: 131 - DNA, 2124 bp, Arabidopsis thaliana
atgaaggaaaaagtggagaagcttgagacagatgatctaaaatggaccgagaggcttccagaatgtcctgtctacagaccaacaaaggaggagtttgaggatcctctgacttatttgcagaagattttcccagaagcttcaaaatatggtatttgcaagattgtatctcctttgacagcaacagttcctgctggcgctgtgttgatgaaagagaaatcaaactttaagttcactaccagagtacaaccccttcgacttgctgagtgggattctgatgataaagttacattcttcatgagtgggaggacctatacatttcgcgactatgagaaaatggcgaacaaggtatttgcacgcagatattgcagtggtggctctttgcccgactcattcttggagaaagaattctggaaggaaattgcgtgtggcaagactgaaacagttgagtatgcgtgtgatgtagatggtagcgcattttcatctgcaccaggtgacccactaggaagcagcaaatggaacttgaataaagtttcaaggcttcctaagtctaccctgcgccttcttgaaacatccattccgggagtcacagaacccatgctttacatcggaatgcttttcagtatgtttgcctggcatgttgaggaccattatttgtacagcattaattaccaacattgtggagcatcaaaaacttggtatgggattccaggttccgcagctctaaaatttgaaaaggtggttaaagagtgtgtgtacaatgatgatattctatcaactaatggagaagatggtgcctttgacgtgcttctggggaagacaactatattccccccaaagactctgttggatcataatgtgccagtgtataaagctgtgcaaaaacctggagaatttgttgtcacattccccagggcttatcatgctggtttcagccacggttttaattgtggtgaggcagtgaactttgcgatgggtgattggtttccatttggagctattgccagttgccggtatgctcatcttaaccgagtaccgttgcttcctcatgaagaattgatttgtaaagaggcaatgctcttgaactcaagttccaaatccgagaatctggatcttacacctacagaattgtcaggacaacgaagcatcaagactgcatttgtacacctgattcgttttcttcatcttgctcgatggtctctaatgaagtcaggattatgcacaggccttgtttcgaatacatatggaaccatagtctgcagtttgtgtaaacgggattgctatttggcatttatcaactgcgagtgttactcacaccccgtttgtctacgtcatgatgttaaaaagcttgaccttccatgtgggacaacgcatactctttacttgagagacaacattgaagacatggaagctgctgcaatgaagtttgagaaggaagatggagtttcagatttgattacaactgatgaagatttatataagtatccatcatcgattacacttccagctgcgaaagaagacggatatacaccgtattccactatatactttgatttctatactgaggtagagatgacatctcatgaccagttgcaatcgggaaatcccgtcatgagttatgaggcaaacgcttcatgtatctcctcagttgctgatgattatgaatgctctgattaccaggtaaatagacgagctaactgtagcagcagtagtgattcaaagctctcggaagaagtagcatgcagcagtagcaaaaaaactcggttcttccctgtggttcaagatgaacaactagttgcggatcaggaaagtgatggatctgattccgagtgttttagagtcaaacgccgttcttcattgaagtttgagaaccgaacagttgttctagacacaagagagtctgaccatcatcaggaacttaagagactgaagaaatcgcatcatcacgaaggaagatatagtagtagcagtagtgttagtaggcaagaagaagaagaagatgagttagtaatttcaaacaggaaagaaactcagcaacaaagtgacgtgaagatgcagaagaagaggatcgagaatcattttggtggctttaaacgtctgaaagtgaaagggctaataaagccgtaa

SEQ ID NO: 132 - protein, 707 aa, Arabidopsis thaliana
MKEKVEKLETDDLKWTERLPECPVYRPTKEEFEDPLTYLQKIFPEASKYGICKIVSPLTATVPAGAVLMKEKSNFKFTTRVQPLRLAEWDSDDKVTFFMSGRTYTFRDYEKMANKVFARRYCSGGSLPDSFLEKEFWKEIACGKTETVEYACDVDGSAFSSAPGDPLGSSKWNLNKVSRLPKSTLRLLETSIPGVTEPMLYIGMLFSMFAWHVEDHYLYSINYQHCGASKTWYGIPGSAALKFEKVVKECVYNDDILSTNGEDGAFDVLLGKTTIFPPKTLLDHNVPVYKAVQKPGEFVVTFPRAYHAGFSHGFNCGEAVNFAMGDWFPFGAIASCRYAHLNRVPLLPHEELICKEAMLLNSSSKSENLDLTPTELSGQRSIKTAFVHLIRFLHLARWSLMKSGLCTGLVSNTYGTIVCSLCKRDCYLAFINCECYSHPVCLRHDVKKLDLPCGTTHTLYLRDNIEDMEAAAMKFEKEDGVSDLITTDEDLYKYPSSITLPAAKEDGYTPYSTIYFDFYTEVEMTSHDQLQSGNPVMSYEANASCISSVADDYECSDYQVNRRANCSSSSDSKLSEEVACSSSKKTRFFPVVQDEQLVADQESDGSDSECFRVKRRSSLKFENRTVVLDTRESDHHQELKRLKKSHHHEGRYSSSSSVSRQEEEEDELVISNRKETQQQSDVKMQKKRIENHFGGFKRLKVKGLIKP

SEQ ID NO: 133 - DNA, 1389 bp, Arabidopsis thaliana
atgggaatacagattataggtcaaattgagagaatcaatggtaaagagctgagttacggcgattttgcagagagatacttagctaagaaccagccagtggtaatatccgatctcactgaagattggcgagctcgggaagattgggtcagtgagaatggaaaccctaatctccacgtatttgccactcactttggaaaatccagagttcaggttgcagattgtgatacgagagaatttacagatcagaaaagattagaaatgtctgttactgaatttgtggagcaatggactaataaggattctattgaggaatctgttttgtatctgaaagattggcactttgtgaaggagtatccagactatacagcttaccaaacaccgccgttgttttctgatgattggcttaacgtgtatctagacaattaccaaatgcatgaggatagagatagtttccagaagtatgatcaaataagctgctctgattatcggtttgtttatatgggtgggaaaggatcttggacacctctacatgctgatgtatttagatcttatagttggtcagctaatgtctgtggtaaaaaaagatggcttttccttcctcctcctcaaagtcatcttgtttatgacaggtacatgaaaaattgcgtttatgacatttttgaagaggtgaatgaaactaaattccctggttttaagaagaccacctggcttgagtgcattcaagaacccggtgaaattatctttgttcccagtggatggcatcatcaagtatataacttggaagacacaatatctattaaccacaattggctcaacgcatacaacctatcttgggtgtgggatctactgtggaaggactacaaggacactgaagagtcaatagaagacataagagacatatgtgatgattttgaagctatctgccaacgtaatcttgctgccaacacaggaatgaatttaaatgatttcttcctcttcatgtcacggttctctttggggaacatggttctactgcaatcttactctgacaaacacaaaaacctgaattcgtgttcattagcaatggcccaaaacctgttaatgaatctctcaactatactgaaagtcatgatgaagatgatatctgcaggcggtgtaactgcagaggaagtgtatctggacttgcgagaaacactggaggatccacagtttctcagatttgtcagagacatgggaagaacttatgcaaggattcacatggaggaagaggatcagtttctttcttcgaaagaattattacaaaagctcagtggtcttgcaggtccaaatatgcaaatatgttctccaaaggatcttgttgaaatgataaaccatcacaatactttttcctcccaaatctattttatttag

SEQ ID NO: 134 - protein, 462 aa, Arabidopsis thaliana
MGIQIIGQIERINGKELSYGDFAERYLAKNQPVVISDLTEDWRAREDWVSENGNPNLHVFATHFGKSRVQVADCDTREFTDQKRLEMSVTEFVEQWTNKDSIEESVLYLKDWHFVKEYPDYTAYQTPPLFSDDWLNVYLDNYQMHEDRDSFQKYDQISCSDYRFVYMGGKGSWTPLHADVFRSYSWSANVCGKKRWLFLPPPQSHLVYDRYMKNCVYDIFEEVNETKFPGFKKTTWLECIQEPGEIIFVPSGWHHQVYNLEDTISINHNWLNAYNLSWVWDLLWKDYKDTEESIEDIRDICDDFEAICQRNLAANTGMNLNDFFLFMSRFSLGNMVLLQSYSDKHKNLNSCSLAMAQNLLMNLSTILKVMMKMISAGGVTAEEVYLDLRETLEDPQFLRFVRDMGRTYARIHMEEEDQFLSSKELLQKLSGLAGPNMQICSPKDLVEMINHHNTFSSQIYFI

SEQ ID NO: 135 - DNA, 1188 bp, Oryza sativa
atgtcgatgcgggagtttgtcgaccactgggctgcgagttcgagcaatggggattctgatggttccctgctgtacctgaaagattggcattttgtgaaggagtaccctggttatgttgcatacaccacaccaacattctttgccgatgattggctcaacatgtatcttgatagtcatcctatacatcgagattctgacattgccaaccatacaaatgaaataaactgtgctgactatcggtttgtttacatgggaccaaaaggaacttggactcctcttcatgctgatgtttttaggtcatacagctggtcggcaaatgtatgcggcagaaaactatggctctttctaccaccatcacaaagtcattttgtatttgataggaacctacgatcttcggtctataacataaatgatgatgtttctgaaaagcagtttcctgaattcaataatactaaatggctagagtgcactcaggagcagaatgaaatcatttttgtgcctagtgggtggtatcaccaagtccataacctggaggatactatatcaataaaccataattggtttaatggctacaaccttcattgggtgtggaacttgcttcatgaagattacaaggtagcaaaagattatattgaagacattcgggacatatgtgacgattttgagggactatgtcaacgcaacttagcagcaaatacaggcatgaacttctatgacttcttcgtcttcataacacgttttgctttagccaatatagttgagctttaccatattcagaatccaaaagatactgacttcatttcagccgaaactgctaaccactttgtctataatctcatgtcgatccgtgatgttgcatcaaaaatggtatctacagaagctttcaataccgagaatatttgtaatatctcagaacaaaaccggagtgctttctctgatatcataaaaatattggaagaagagagtttcagaaggttattggtggcgttgtcaaaggcatataattacatagacagaggacaaaaagattgtctcaaaatgaaggattcaagtcagaagggttgtttgtcagtaacctgcttaaaacctgactgtaatgttgttggtgacattatttctttcatgcgtgagattcatggacctatggatttggtaacactaattgatagtgctctctctgatagatag

SEQ ID NO: 136 - protein, 395 aa, Oryza sativa
MSMREFVDHWAASSSNGDSDGSLLYLKDWHFVKEYPGYVAYTTPTFFADDWLNMYLDSHPIHRDSDIANHTNEINCADYRFVYMGPKGTWTPLHADVFRSYSWSANVCGRKLWLFLPPSQSHFVFDRNLRSSVYNINDDVSEKQFPEFNNTKWLECTQEQNEIIFVPSGWYHQVHNLEDTISINHNWFNGYNLHWVWNLLHEDYKVAKDYIEDIRDICDDFEGLCQRNLAANTGMNFYDFFVFITRFALANIVELYHIQNPKDTDFISAETANHFVYNLMSIRDVASKMVSTEAFNTENICNISEQNRSAFSDIIKILEEESFRRLLVALSKAYNYIDRGQKDCLKMKDSSQKGCLSVTCLKPDCNVVGDIISFMREIHGPMDLVTLIDSALSDR

SEQ ID NO: 137 - DNA, 3861 bp, Oryza sativa
atgaggccctcgccgcctcccgccgccccggcggcggaaccggtgcccccgtggctgagatcgctgcccgtcgcgcccgagttccgccccaccgccgccgagttcgccgatcccgtctcctacatcctcaagatcgagcccgccgcggcgccgtacggcatctgcaaggtcgtgccgccgttgcccccgccgccgaagaaggccaccttctccaacctctcccgctccttcgccgcgctccacccggacgaccgctcgccgtccttccccacccgccaccagcaggtcggcctctgcccgcgccgcacgcgcccggggctcaagcccgtgtggcggtcctcccaccgctacacgctcccgcagttcgagtccaaggccggcgccacccgcaagtcgctcctcgccggcctcaacttccctgcctccaggcaactcaccccgctcgaccacgaggtgctcttctggcgcgcatcggccgaccgccccatcgtggtcgagtatggcagcgacatgtcgggctcgggattctccccttgcgccgcgcagccgcagccgccgccgcagcagcaaccgacggcgcgggcggcggcgcaccttggggagacggcgtggaacatgcgcggcgtggctaggagccccggatcgctgctgcggttcatgccggaggatgtccccggggtcaccacgccgatgctctacgtcgggatgatgttcagttggttcgcgtggcacgtcgaggaccacgacctgcacagcctcaactacatgcacctcggggccgccaagacgtggtacggcgtgccgcgcgacgccgcgctcgcgttcgaggacgtggtgcgcgaacatggctacggcggggaggtgaaccccctagaaaccttcgctacattggggcagaaaacaacagtgatgtcccctgaagtgcttgtggagtcgggtatcccctgctgcagattggtgcagaatgcaggggaatttgtggtcacttttccaggatcttatcactgcggtttcagtcatggattcaactgtggggaagcatcaaatatagctactcctgaatggttgagaatagcaaaagaggcagcaatccgaagagcttcaatcaatcgtcctcccatggtttcgcactatcaattactttacgatctcgcactgtctatgcgttttagggaaccatccaatggtgaaatggagacacggagctctcgaataaaggagaagaagaaatgcgaaggggaacaactggtcaagaagatgttcatccaaaatgttattgaagataatgaactgcttagtcatcttctaaatgacggatcatcttgtattattcttccagcaaatgcccatgatggtcctggtctttctactttgcgctcaacagatcaatcaaatatgaattccagaatatcacataacctatgcagtagggaagaagctccagaagcctcaggatgcttatcgccgaacaggaatggtgataccagaaattgtatttcatcagatacgcataacatggaaggtgataagggagatataatgagcgctactggattgttagatcagggtctattatcatgtgtcacttgtggaattttaagtttttcatgtgtggctgtactcaaaccaagagattctacagcacgatacttgatgtctgctgattctaattcaattaataaccagctttctatttctggagggagtattctggcagatgcgccaacaaatgaaaggaatggtgtcatttctcgtccatattctgaacactgttgcaacgaaataatggccgatgatgcagaaatcgataagaattctgctcttgatctcttggcatttgctcatgggggtcaaccagatcctgaagaagatccactggagaaaatactgaagattgcacatggcattaacaaatcacaacctaatagttcaaataatgttggttgtgttggaacaaagctgtcctcaagtagcacagagcgccaagaaagaccatcttcccagaacgctcattgtaatggtagctcagttatttcaaatggaccgaaaggtgttcgcacgagaaataagtatcaacttaagatggtactttctgaaggttttcaggcaaaggatatctattctgcgaaggaaaagaaggttcaatcagaaccatcaagctcaaaaggggatgttaaggagacaattgatgttagtggcacagagaacgatgtcggatgtaaaagcactacaatctctgtcagtgaacacaggggttctacaaagaatatgtattcagtgaaggaaaagaaggttcaatcgaaaccatcaagcttaaaggggactgttaaagagacagttgatgtcagtggcacagagaacgatgctagatgtaaaagcattacaatctctgtcagtgaacacaggggttctacacctatgaccaatagtttagctgcatcaatcgtgaaacctgacaaggattcatcaagaatgcatgtattttgtcttgagcatgctattgaggttgagaagcaactgcatgctataggtggttctaatattatgcttatatgtcgtccagaatatcccaaaatagaagcggaagcaagattgttgggtgaagaaatgggactggtatatgactggaagggcattcatttcaaggaggccaacatggaggacaggcagaagatacaggaagttctgcgggatgaggaagcaatacctacaagcagtgattgggctgtaaaattgggtattaacctttattatagtgcaaatctggccaaatctcctttatataacaaacaaatgccatacaacagagtcatttatagggcatttggctgtgattctcctaatgactcgccagtaatgttcaatacttgcgaaaggaaacaaagccaccagaagaaaatagtggttgctggccggtggtgtgggaaagtatggatgtcaaaacaggtccatccatacttggctcacagagttgaaagccaggaagcggaagaagcagatagaatctgttcttatcattttgatgagaagcacaaagctgagccagttgggaattctagtagagtggaagcctccaaaagaaagagtagcagtttgacagacgtaacagaatcaagcaatagaaggggggaaatacctggtgaggaaacaaacaccaagaggcccaaacattctcaagagaacaatctcagagctttggaaaccgctgctgaagttgtggtgccctcaccagctggaacaggtctccgcgttagctccaggattgccaacagggcaaacaagctaaaatcaaagatggaaaaggaggatgtcccttctagccgtccaaagtctaacataaaggagaaaagcagtcatgctagcggtcagaaatcaaatgttcaagaggcgaatgctaattctgctagccatttgagagcaatgccaccaaaacagaaggctgaagcagaagcaaagaagcaaataagaactccaaaacctccaaagcaagcagtggagtactcgtgcgatattgagggttgttctatgagttttcgtacaaagcgggacttgtctctgcacaagagtgatatctgcccagtgaaaggctgcgggaagaagttcttctcgcacaagtatctgctgcagcatcgcaaggttcacacagatgaccgtccgctaacatgcccatggaagggctgcaacatggcattcaagtggccatgggcaaggactgaacatctcagggttcatacaggcgacaggccctatgtttgccatgagccaggttgcgcacagacattcaggtttgtctcagatttcagccgtcacaagcgcaagacaggtcattctgtcaagaagaagaagaaagcaaagagttga

SEQ ID NO: 138 - protein, 1286 aa, Oryza sativa
MRPSPPPAAPAAEPVPPWLRSLPVAPEFRPTAAEFADPVSYILKIEPAAAPYGICKVVPPLPPPPKKATFSNLSRSFAALHPDDRSPSFPTRHQQVGLCPRRTRPGLKPVWRSSHRYTLPQFESKAGATRKSLLAGLNFPASRQLTPLDHEVLFWRASADRPIVVEYGSDMSGSGFSPCAAQPQPPPQQQPTARAAAHLGETAWNMRGVARSPGSLLRFMPEDVPGVTTPMLYVGMMFSWFAWHVEDHDLHSLNYMHLGAAKTWYGVPRDAALAFEDVVREHGYGGEVNPLETFATLGQKTTVMSPEVLVESGIPCCRLVQNAGEFVVTFPGSYHCGFSHGFNCGEASNIATPEWLRIAKEAAIRRASINRPPMVSHYQLLYDLALSMRFREPSNGEMETRSSRIKEKKKCEGEQLVKKMFIQNVIEDNELLSHLLNDGSSCIILPANAHDGPGLSTLRSTDQSNMNSRISHNLCSREEAPEASGCLSPNRNGDTRNCISSDTHNMEGDKGDIMSATGLLDQGLLSCVTCGILSFSCVAVLKPRDSTARYLMSADSNSINNQLSISGGSILADAPTNERNGVISRPYSEHCCNEIMADDAEIDKNSALDLLAFAHGGQPDPEEDPLEKILKIAHGINKSQPNSSNNVGCVGTKLSSSSTERQERPSSQNAHCNGSSVISNGPKGVRTRNKYQLKMVLSEGFQAKDIYSAKEKKVQSEPSSSKGDVKETIDVSGTENDVGCKSTTISVSEHRGSTKNMYSVKEKKVQSKPSSLKGTVKETVDVSGTENDARCKSITISVSEHRGSTPMTNSLAASIVKPDKDSSRMHVFCLEHAIEVEKQLHAIGGSNIMLICRPEYPKIEAEARLLGEEMGLVYDWKGIHFKEANMEDRQKIQEVLRDEEAIPTSSDWAVKLGINLYYSANLAKSPLYNKQMPYNRVIYRAFGCDSPNDSPVMFNTCERKQSHQKKIVVAGRWCGKVWMSKQVHPYLAHRVESQEAEEADRICSYHFDEKHKAEPVGNSSRVEASKRKSSSLTDVTESSNRRGEIPGEETNTKRPKHSQENNLRALETAAEVVVPSPAGTGLRVSSRIANRANKLKSKMEKEDVPSSRPKSNIKEKSSHASGQKSNVQEANANSASHLRAMPPKQKAEAEAKKQIRTPKPPKQAVEYSCDIEGCSMSFRTKRDLSLHKSDICPVKGCGKKFFSHKYLLQHRKVHTDDRPLTCPWKGCNMAFKWPWARTEHLRVHTGDRPYVCHEPGCAQTFRFVSDFSRHKRKTGHSVKKKKKAKS

SEQ ID NO: 139 - DNA, 2994 bp, Oryza sativa
atgccgcccaagaggaagcgcggtggcgggaggccgcgcaaggccccggaggacgccgccgccaaggaaaacggtgagaagacaaacaaggaggaggaaacgcaggcttctcctgaggagaatggcgcagggcagactcaggcctcgagaaccgcaagaaagcgcaggaagggtcctgttgctgatccctcttcgactgaacttccacccaggaagctcagggacaggcggaacgttccagcggtagactacaaggagaataagcacacaaaaaagatggatggaacttcaaccatgtgccatcagtgccaaaggaaggacagtggaagagttgtgaggtgccggaatggtgctgaaaaaaacaggaggcacagatattgtgtcaagtgcatcaaacgctggtacccgcatctaacagaggacgattttgagaactgctgtccagtttgtcacaataactgcaattgtaagacttgtctgcggacaaatgtaataaataagggtgacaaggagtttgccgatggtaagaacaaaattaaatactctctgcgtattgcacgctttttgctcccttggttgaaacaacttcaccaagagcagatgctagagaaaagtgttgaggccacaattaaagggatcgatgtaactgacttggaggttcctcaagctcagtttaataatgatgagcggatttactgtgataactgcagaacatccattgttgacttccacagaagttgtaaaagtggtcactatgatctctgcctcagctgctgccaggagttgcgtcaaggtcttactactggtactgttgtcacttgtgacacagctgttgatgtacctgaaatagaaggcaaggaaggtttgcaagagggaagtagtcatagcagtgctgtaggtcaaggggcttctgatcaacagaatgacaggttgataggtagtgcagctccttcagaggattgcactcctagtttgatatggagggcaaaaagcaacggaagcataccatgcccacctaatgcaggtggttgcggggattgtcttctcgaacttaggtgtttgtttaaggagaactttatttctgatttactggataaagtcaattcagtggtcaataaggaaacagagcaggagttgggaggctctagatgttcctgcttcactgaatccggtgaagtgaacaatgaaacatcacggaaatcagcttgcagagaggactccaatgataactacatatattgtccaactgctagagaagttcaaagtggagctttagatcattttcagcagcattggttgaatggtcagccagtcattgttcgtgacgtgcttgagctaacttctggactgagctgggagccaatggttatgtggcgggccttacgggaaaagagagacaagaaagagcatgaacggctctcagttatagctcttgattgtctgacatggtttgagtttatgtaccaccaggatgtgttggtggtgccagtttcatatctggggttcaacagcaccattgaaactactttatatttcaaactggttgatataaatattcacatgttttttgaggggtattcccgtggagctgttggttcggaggatttgcctgtgctacttaagcttaaagattggccacaacatagttcctttgaggagcgcctgccgcggcatggtgctgagttcatgtctgcactaccatttcgtgagtatacagatccaaaatctggtccccttaatctggcagtgaagcttccaaaacatgttaaaaagccagatcttggtccaaagacatacattgcttatggtgtcgcccaagagttgggaataggtgattctgttacgaagatccattgcgacatgtctgatgcggttaatattctcatgcatactgatgaggtagaactcaaagctgaaaggattacagcaatagagaaaaagaaagagagcttacgtaaagatggcaagaatcttcatgttctgcgaccagaccatgacgatgatacatcaatagctctcagtgaatcaactgaagtgccaagatctcgaggacttgaaaatggctcaagcattaagcagccagcaccaaatgttgctgtaatggaccagggaggtgttcatacagatatggtagctgatgaagctgagggaaacttgagtctgtctaatgggcaatcacccaatcaaagtgatgcacataatatggatattactttctccaagggggaaacagaccattctatctgcacaattaatgggggagaggagatgggcaatggctttgggagggaagataaatgtaaatcttctcatggtgtaggatcatctgaatcttctgattgtcaaagacgcagtaggcgacgtgatgcttgctcttccagtgcaacaggggaaataaacgaaaccagcatggagactaacaaatttaccatatctattgagcccaaagatgatcacccatttgttgagggaaatcagacagagggtggtgcattgtgggatatcttccgacgtgaagatgtcagcaaattgcatgattatctgatgaagcatgcagaagagtttagacattataattatgaaacagtcaaacaggtttctcatcctattcacgatcaatgcttttatctaacaaatgagcacaagagaaagctcaaggaagaacatggaattgagccttggacatttgaacagaaacttggtgaggctgtgtttatcccagcaggatgtccccaccaagtcagaaatttgaagtcatgtataaaggttgcacttgactttgtttctccggaaaatgtgcaagagtgcatcaggctgacagaagaatttcgcttgcttccgaagggtcatagggtgaatgaagataaactagaggttaagaagatagctctatatgcacttgatcaagccattgacgatatcacaggcaaaagttgcaatgaaaggacaaaggatgaaggggaagaggaggcgtctgccccaagtgttagttaa

SEQ ID NO: 140 - protein, 997 aa, Oryza sativa
MPPKRKRGGGRPRKAPEDAAAKENGEKTNKEEETQASPEENGAGQTQASRTARKRRKGPVADPSSTELPPRKLRDRRNVPAVDYKENKHTKKMDGTSTMCHQCQRKDSGRVVRCRNGAEKNRRHRYCVKCIKRWYPHLTEDDFENCCPVCHNNCNCKTCLRTNVINKGDKEFADGKNKIKYSLRIARFLLPWLKQLHQEQMLEKSVEATIKGIDVTDLEVPQAQFNNDERIYCDNCRTSIVDFHRSCKSGHYDLCLSCCQELRQGLTTGTVVTCDTAVDVPEIEGKEGLQEGSSHSSAVGQGASDQQNDRLIGSAAPSEDCTPSLIWRAKSNGSIPCPPNAGGCGDCLLELRCLFKENFISDLLDKVNSVVNKETEQELGGSRCSCFTESGEVNNETSRKSACREDSNDNYIYCPTAREVQSGALDHFQQHWLNGQPVIVRDVLELTSGLSWEPMVMWRALREKRDKKEHERLSVIALDCLTWFEFMYHQDVLVVPVSYLGFNSTIETTLYFKLVDINIHMFFEGYSRGAVGSEDLPVLLKLKDWPQHSSFEERLPRHGAEFMSALPFREYTDPKSGPLNLAVKLPKHVKKPDLGPKTYIAYGVAQELGIGDSVTKIHCDMSDAVNILMHTDEVELKAERITAIEKKKESLRKDGKNLHVLRPDHDDDTSIALSESTEVPRSRGLENGSSIKQPAPNVAVMDQGGVHTDMVADEAEGNLSLSNGQSPNQSDAHNMDITFSKGETDHSICTINGGEEMGNGFGREDKCKSSHGVGSSESSDCQRRSRRRDACSSSATGEINETSMETNKFTISIEPKDDHPFVEGNQTEGGALWDIFRREDVSKLHDYLMKHAEEFRHYNYETVKQVSHPIHDQCFYLTNEHKRKLKEEHGIEPWTFEQKLGEAVFIPAGCPHQVRNLKSCIKVALDFVSPENVQECIRLTEEFRLLPKGHRVNEDKLEVKKIALYALDQAIDDITGKSCNERTKDEGEEEASAPSVS

SEQ ID NO: 141 - DNA, 2988 bp, Oryza sativa
atggcggcggaggaggtggaggcggcggcgatcgacggatccggcgaggaggcgaagcggaagagtggtaagcagaggggatcgggcgccaaggggaggcgccggaacggcgaccgggctttccgcccgccggcgatgaggccggaggaagaagggcgcggtgttgcgacgaggcccggggcgctcagggaaaggaagccgccgcccaacgccttcaacgcgccagacgatgatgaggatgtcgagaaaactgatcaacttctcgagcctctcaacaagcccaaaagacgtgatgcagggaagaagagaggacccagaaaaaagaaagtggatcaagagaacatcaaaacccacaggcataacgcaaatgcagtaaaaggcaagatgttagtcaatgataaggtttcgaagactgaaaagaagcgtaagagaggagacacaggagcggcagaaaataatgggaaagggaagaaaatgttgacaggtgaaaacgccttaatgtgtcaccaatgccagagaaatgacaaagggagagtggtctggtgcaagacttgcaacaataagcgcttttgtgtgccatgcattaatcaatggtatcctgatttgcctgaaaatgaatttgctgcaaaatgcccttattgtcgcaagaattgtaattgcaaggcatgcctgcgaatgagaggtgtcgaagagcctccaagaaaggaaatttctaaagaaaatcagattcgttatgcctgtcatgtgttacgcttgttgcgtccttggctgatagaactgcgacaggagcagatggcagagaaggaattagaggctaagatacaaggtgtttcagttgatcaaataaaggtggaacaagctgtgtgtgatctagatgagcgtgtctattgcaatagatgcagcacttctatagttgattttcatagaagctgcaagcactgtttctatgacttgtgcttgacctgctgccaggagcttcgcaaaggtgagatccctggaggagaagaggtggaaattttggatcctgaagaaagagacaaggattatgcttttggtaagattctgtcagatggtgagaaccaaagggactctttgaagtgtcgcagcgacacccaaaacagtgagtcaaacaaaggcatggcttctgacgaaaaccaaaagaaggctctgttactttggaaagcaaacagtaatggtagcataccttgcccacgaaaggaaaaggaagactgcagtttttcatctctagatctgaaatgcttgtttccagagaagttgctccctgaattagaagatagatctgagaaggtcttctggagtgaaacatttgcaaaagaactaggtagaacaagtgagctgtgcccttgttttgatcactcaggcaagataagaagtgacagcaagaaattacgtcaggctgcaaatagggaggactcgagtgataactacttatactgtccggtggccactgatatccaggacgctgacctgttgcactttcagatgcattgggcaaagggcgaaccagttgttgtttcagacactcttaagctaacttctggtcttagctgggagccgatggttatgtggcgggcagtacgagaacgaaccaaagggaaggcagaagatgagcagtttgctgtgagggcagtagattgcctcgactggtgtgaggtggaaattaacatacacatgttttttatgggatatacaaggggcagaactcatcccaggacctactggcctgagatgcttaagctaaaggactggcccccttctagctcatttgatcagcgattgcctcgccatggtgctgaatttatcagtgcattgccatttccggagtatactgatccacgatatggtccgctaaatcttgcagtgaagcttcctggtggtgtcctgaagccagatcttgggccaaaaacttacattgcctatggattttctgaagagttgggcaggggtgactctgtaaccaaacttcactgtgacatgtctgatgcagtaaacatcttaacacacacagcggaagtgccctgtgagacttatgatgctgttcagattaaaaacacgcagaaaaagatgaaaatgcaagatgacatggaaatatatgggatgatagaatcaggcagtgaactcaagccatcagcatgcccagttgaattggggaacaaagctgttggtgaagcaccaaaggcctcatgcagcaaagaaaatgttcataccttgaaagacaagtctaatggtttggatataaacgcttcaccacctgatgatgctggaggtgatgccagggatgaagcattgtcctatgaatctgtggtacatagtgatgtagctcagtgtccaaaccataaccatgagaccaataattctgatgatgcacgtattggagctcagagatgtcaaaagaaagctaaaggtcgtcctccgaagacaggttcaggggtatcagagcaccaggaaagtggtggtgctttgtgggatattttccgaagagaggactctgagaaattacaagacttccttaggaagcatgcgccagaatttcggcacatccactgcaatccagtgaaacaggttattcatccaattcatgatcaagctttctatttaactgcggagcataaaagaaagctgaaggaagaatatggtgttgaaccttggacctttgaacaaaagcttggcgaagcagttttgattcctgccggatgtcctcaccaagtcaggaatttgaagtcctgcatcaaggttgcactggactttgtttcccccgagaatgttggtgagtgtgttaggctgaccaaggaatttagacgacttccatcttcccacagggctaaagaagataagctagagatcaagaagatggctttccatgctctgaatgaagttctaaactttctggatcctccttcctcagaagggtcgaaagaagcggcggagaagcctcgaagggggcgtggtcgcccaagaaaacactag

SEQ ID NO: 142 - protein, 995 aa, Oryza sativa
MAAEEVEAAAIDGSGEEAKRKSGKQRGSGAKGRRRNGDRAFRPPAMRPEEEGRGVATRPGALRERKPPPNAFNAPDDDEDVEKTDQLLEPLNKPKRRDAGKKRGPRKKKVDQENIKTHRHNANAVKGKMLVNDKVSKTEKKRKRGDTGAAENNGKGKKMLTGENALMCHQCQRNDKGRVVWCKTCNNKRFCVPCINQWYPDLPENEFAAKCPYCRKNCNCKACLRMRGVEEPPRKEISKENQIRYACHVLRLLRPWLIELRQEQMAEKELEAKIQGVSVDQIKVEQAVCDLDERVYCNRCSTSIVDFHRSCKHCFYDLCLTCCQELRKGEIPGGEEVEILDPEERDKDYAFGKILSDGENQRDSLKCRSDTQNSESNKGMASDENQKKALLLWKANSNGSIPCPRKEKEDCSFSSLDLKCLFPEKLLPELEDRSEKVFWSETFAKELGRTSELCPCFDHSGKIRSDSKKLRQAANREDSSDNYLYCPVATDIQDADLLHFQMHWAKGEPVVVSDTLKLTSGLSWEPMVMWRAVRERTKGKAEDEQFAVRAVDCLDWCEVEINIHMFFMGYTRGRTHPRTYWPEMLKLKDWPPSSSFDQRLPRHGAEFISALPFPEYTDPRYGPLNLAVKLPGGVLKPDLGPKTYIAYGFSEELGRGDSVTKLHCDMSDAVNILTHTAEVPCETYDAVQIKNTQKKMKMQDDMEIYGMIESGSELKPSACPVELGNKAVGEAPKASCSKENVHTLKDKSNGLDINASPPDDAGGDARDEALSYESVVHSDVAQCPNHNHETNNSDDARIGAQRCQKKAKGRPPKTGSGVSEHQESGGALWDIFRREDSEKLQDFLRKHAPEFRHIHCNPVKQVIHPIHDQAFYLTAEHKRKLKEEYGVEPWTFEQKLGEAVLIPAGCPHQVRNLKSCIKVALDFVSPENVGECVRLTKEFRRLPSSHRAKEDKLEIKKMAFHALNEVLNFLDPPSSEGSKEAAEKPRRGRGRPRKH

SEQ ID NO: 143 - DNA, 2607 bp, Oryza sativa
atgttagtcaatgataaggtttcgaagactgaaaagaagcgtaagagaggagacacaggagcggcagaaaataatgggaaagggaagaaaatgttgacaggtgaaaacgccttaatgtgtcaccaatgccagagaaatgacaaagggagagtggtctggtgcaagacttgcaacaataagcgcttttgtgtgccatgcattaatcaatggtatcctgatttgcctgaaaatgaatttgctgcaaaatgcccttattgtcgcaagaattgtaattgcaaggcatgcctgcgaatgagaggtgtcgaagagcagcctccaagaaaggaaatttctaaagaaaatcagattcgttatgcctgtcatgtgttacgcttgttgcgtccttggctgatagaactgcgacaggagcagatggcagagaaggaattagaggctaagatacaaggtgtttcagttgatcaaataaaggtggaacaagctgtgtgtgatctagatgagcgtgtctattgcaatagatgcagcacttctatagttgattttcatagaagctgcaagcactgtttctatgacttgtgcttgacctgctgccaggagcttcgcaaaggtgagatccctggaggagaagaggtggaaattttggatcctgaagaaagagacaaggattatgcttttggtaagattctgtcagatggtgagaaccaaagggactctttgaagtgtcgcagcgacacccaaaacagtgagtcaaacaaaggcatggcttctgacgaaaaccaaaagaaggctctgttactttggaaagcaaacagtaatggtagcataccttgcccacgaaaggaaaaggaagactgcagtttttcatctctagatctgaaatgcttgtttccagagaagttgctccctgaattagaagatagatctgagaaggtcttctggagtgaaacatttgcaaaagaactaggtagaacaagtgagctgtgcccttgttttgatcactcaggcaagataagaagtgacagcaagaaattacgtcaggctgcaaatagggaggactcgagtgataactacttatactgtccggtggccactgatatccaggacgctgacctgttgcactttcagatgcattgggcaaagggcgaaccagttgttgtttcagacactcttaagctaacttctggtcttagctgggagccgatggttatgtggcgggcagtacgagaacgaaccaaagggaaggcagaagatgagcagtttgctgtgagggcagtagattgcctcgactggtgtgaggtggaaattaacatacacatgttttttatgggatatacaaggggcagaactcatcccaggacctactggcctgagatgcttaagctaaaggactggcccccttctagctcatttgatcagcgattgcctcgccatggtgctgaatttatcagtgcattgccatttccggagtatactgatccacgatatggtccgctaaatcttgcagtgaagcttcctggtggtgtcctgaagccagatcttgggccaaaaacttacattgcctatggattttctgaagagttgggcaggggtgactctgtaaccaaacttcactgtgacatgtctgatgcagtaaacatcttaacacacacagcggaagtgccctgtgagacttatgatgctgttcagattaaaaacacgcagaaaaagatgaaaatgcaagatgacatggaaatatatgggatgatagaatcaggcagtgaactcaagccatcagcatgcccagttgaattggggaacaaagctgttggtgaagcaccaaaggcctcatgcagcaaagaaaatgttcataccttgaaagacaagtctaatggtttggatataaacgcttcaccacctgatgatgctggaggtgatgccagggatgaagcattgtcctatgaatctgtggtacatagtgatgtagctcagtgtccaaaccataaccatgagaccaataattctgatgatgcacgtattggagctcagagatgtcaaaagaaagctaaaggtcgtcctccgaagacaggttcaggggtatcagagcaccaggaaagtggtggtgctttgtgggatattttccgaagagaggactctgagaaattacaagacttccttaggaagcatgcgccagaatttcggcacatccactgcaatccagtgaaacaggttattcatccaattcatgatcaagctttctatttaactgcggagcataaaagaaagctgaaggaagaatatggtgttgaaccttggacctttgaacaaaagcttggcgaagcagttttgattcctgccggatgtcctcaccaagtcaggaatttgaagtcctgcatcaaggttgcactggactttgtttcccccgagaatgttggtgagtgtgttaggctgaccaaggaatttagacgacttccatcttcccacagggctaaagaagataagctagagatcaagaagatggctttccatgctctgaatgaagttctaaactttctggatcctccttcctcagaagggtcgaaagaagcggcggagaagcctcgaagggggcgtggtcgcccaagaaaacactag

SEQ ID NO: 144 - protein, 868 aa, Oryza sativa
MLVNDKVSKTEKKRKRGDTGAAENNGKGKKMLTGENALMCHQCQRNDKGRVVWCKTCNNKRFCVPCINQWYPDLPENEFAAKCPYCRKNCNCKACLRMRGVEEQPPRKEISKENQIRYACHVLRLLRPWLIELRQEQMAEKELEAKIQGVSVDQIKVEQAVCDLDERVYCNRCSTSIVDFHRSCKHCFYDLCLTCCQELRKGEIPGGEEVEILDPEERDKDYAFGKILSDGENQRDSLKCRSDTQNSESNKGMASDENQKKALLLWKANSNGSIPCPRKEKEDCSFSSLDLKCLFPEKLLPELEDRSEKVFWSETFAKELGRTSELCPCFDHSGKIRSDSKKLRQAANREDSSDNYLYCPVATDIQDADLLHFQMHWAKGEPVVVSDTLKLTSGLSWEPMVMWRAVRERTKGKAEDEQFAVRAVDCLDWCEVEINIHMFFMGYTRGRTHPRTYWPEMLKLKDWPPSSSFDQRLPRHGAEFISALPFPEYTDPRYGPLNLAVKLPGGVLKPDLGPKTYIAYGFSEELGRGDSVTKLHCDMSDAVNILTHTAEVPCETYDAVQIKNTQKKMKMQDDMEIYGMIESGSELKPSACPVELGNKAVGEAPKASCSKENVHTLKDKSNGLDINASPPDDAGGDARDEALSYESVVHSDVAQCPNHNHETNNSDDARIGAQRCQKKAKGRPPKTGSGVSEHQESGGALWDIFRREDSEKLQDFLRKHAPEFRHIHCNPVKQVIHPIHDQAFYLTAEHKRKLKEEYGVEPWTFEQKLGEAVLIPAGCPHQVRNLKSCIKVALDFVSPENVGECVRLTKEFRRLPSSHRAKEDKLEIKKMAFHALNEVLNFLDPPSSEGSKEAAEKPRRGRGRPRKH

SEQ ID NO: 145 - DNA, 1062 bp, Oryza sativa
atgccgccccagcctccgccggcggcgtcggcgtcggccagtgccccggatcccgccgtcccggcttggctcagggggctcccccgcgcgcccgagtaccgcccgacggagtccgagttcgccgaccccatcgccttcctctcccgcgtggagcgcgaggccgccgcctacggcatctgcaaggtcatcccgccccacccgcgcccttcccgccgcttcgtcttcgcccacctcaaccgctccctcgtctcctcctgcgacgcccccgcgccctctcccgccgccgcctccgactcgtccattcctccatcctcctcctcgccgccgccggtctccgccgcggtgttcacgacacggcaccaggagctcggcaacccgcggcgtggacgcccgacgccgcaggtgcttaagcaggtgtggcagagtggggagcggtacacgctcgaccagtttgagtccaagtcccgcgccttctcaaagacgcacctcgctggactccacgaaccgactgcgctcgcggtggaatcactcttctggaaggcgtcggcggaccgtcctatctatattgagtacgccaatgatgtccctggctctgggtttgctgcacccgtgcagttgcaacgcaagaagaagcagaaaagagagactgccccgatggacgaatgggagaagagttcaggctggaggctgtcaaatagcccatggaacctgcaagcaattgcgcgggctcctggttcgctcacacggtttatgcctgacgatgttcctggggtgacttctccaatggtttacattggcatgctgttcagctggtttgcgtggcatgtggaggatcatgatctgcatagtctcaacttcctccacactggcgcacctaagacgtggtatgcggttcctggtgatagggctgttgagcttgaggaagttatccgtgtacatggctatggaggcaacactgatcggatcgcgtcactagcagtgcttggtgagaaaacaacactaatgtccccagaggtccttatagacaatgattggtgcaatatcctggtgagtttgtggtga

SEQ ID NO: 146 - protein, 353 aa, Oryza sativa
MPPQPPPAASASASAPDPAVPAWLRGLPRAPEYRPTESEFADPIAFLSRVEREAAAYGICKVIPPHPRPSRRFVFAHLNRSLVSSCDAPAPSPAAASDSSIPPSSSSPPPVSAAVFTTRHQELGNPRRGRPTPQVLKQVWQSGERYTLDQFESKSRAFSKTHLAGLHEPTALAVESLFWKASADRPIYIEYANDVPGSGFAAPVQLQRKKKQKRETAPMDEWEKSSGWRLSNSPWNLQAIARAPGSLTRFMPDDVPGVTSPMVYIGMLFSWFAWHVEDHDLHSLNFLHTGAPKTWYAVPGDRAVELEEVIRVHGYGGNTDRIASLAVLGEKTTLMSPEVLIDNDWCNILVSLW

SEQ ID NO: 147 - DNA, 2784 bp, Oryza sativa
atggaggcggcggcggcggcggccgccgtgccggaggagctgcggtgcaagcgctccgacggcaagcagtggcgatgcagcgcgccctccatgcccgacaagaccgtctgcgagaagcactacgtccaggccaagaagcgcgccgcctcctccgcgctccgggcctccctccgcaggtcctccgcctccgcctccgccgcgcggggcacgaccccgcctgcgcggatggcggtcgcgaggcccatctacggcagggtcgcgggggagccggtgtacgtggcggagccggcgctgccgccgccgccgccgccgccacggaggaggcagccggtccacgggctgcccatgggcaatgctgccggcgcgcgcaccgcggcggagctggtcgggaggggctcggcggggctggttgcctgcagctcggcggcgggggcggcagcggccgcaacctgccatcagtgccggagggtcgctaataccatttgttgtacaagctgcgacagaagggggtactgcaccaactgcatctcgagatggtactctgatatcccaattgatgatgttcgaaaggtttgtccagcatgtcgtggcatttgtaactgcagagtttgcttactaggagataatgtaataaaggcaagggttcaggagatatctgctgtagataagttggaatatcttcatagcattctggcatctgtccttccagtattaaagcagatttattctgatcaatgtttcgaaattggtgttgatacaaaagcttatggacttaggacagatataatcagggcgaaggtcaatcctgatgagcaaatgtgctgtgacttctgcaaagtgccagtatttgattatcaccgacactgcccaaggtgtttgtatgacttatgtcttgactgttgtcgagacataaggcgatctaggaccagtgttgcaagaggagaatatgctgaaggtcgtgtggtagatagaagtaaagatacttcgaataaaagagcaagaatggaaccatctgcagaaagtgcaaatgataagtcagtcccacaacgaagggacataaaaaatattgacattagatctttattccctacatggagagtcaataatgatggaagcattacttgtgggcctcatgaggctggtggttgtggctcctcgaagttagtgttaaggcgaatattcaaaataaactggattagtaagcttgtaaaaaattctgaggaaatggtcaatggttgtaaagtacatgttcttgagaatggatgctcatcctgcaatgatggcagaacattagagttaactggtcatcgtaactttggtgtctcaacatgttcaaataatggtggtattgatcggttctgtgtgttctctcctgtattagaggacttgaaatctgaaggtattattcattttcgtaaacactggataaaaggagaacctgtagttatcaggaatgcgtttgagccttctctgtcatcaagctgggacccactaaatatttggcgaggaatccaggaaatcatggatgaagaagtggatgacgatgtcattgtcaaagctgtggattgctcaaaccaagcagaggtggatattgagctgaaacagtttatcaaaggttattcagatggtcacaagggggaagatggggaattgatgatgctgaaattgaaagagtggcccccacccagtgtattggaggagtttctgctatgccaaagaccagaatttattgtcaattttccattagttgattttatacattccaggtgggggctcctaaatctttctgctaaattgcccccagacaccctacaacctgaagttggcttgaagctgttaattgcatatggaagacatcaagaagctggtaaaggtgattcagtgacaaatctaatgattaacatggctgatgtggtgcatatgctaatgcatacagccaaagggcatgacgtatgtccaaagaggctacaacctgagcgatctgaaaagattgccaatggaatgacaatgcatgtaaatgctcatgcacctgttcaaaatttgaatgtggatatgggggaacaatcacctgaccatgtaagctcaaagtttgatgaaagagcgcatgcgtctgccttgcgattacaagagaagtcttcagatgccaaacttaattgtggtttcgaaggctcttcaactgagttatcttgctcgtcacattcagaggaaccaaaagttaatggttcagaaagaagtcaggctggttctgtttgggatgtgttccgcaggcaggatatttcaaagctgaatgaatatttaactgctaactgggaagaactggcagctagtagtcaggttaagaatcctatttatgaacaatctatatatctcaacaagtatcataaaaggatactgaaggatcaatatggaattgaaccctggacattccaacaacatatcggtgaggctgtatttgttcctgctggctgcccattccaagtgaaaaatctccagtctacggttcaattggctcttgatttcctgtcaccggaaagtttgggggagtcggcccgaatggcccaggagattcgctgcctaccaaatgatcatgatgcaaaactgaagatgctcgagattggaaaaatctctttatatgcagctagttctgctgtcagagaaattcagagaataaccctcgatcccaagtttaatctagaccttaaattcgaggatcagaatctaactcaggcggtttctgagaacttggctagagtcaccaaacaacggaatgtaccatgcagctga

SEQ ID NO: 148 - protein, 927 aa, Oryza sativa
MEAAAAAAAVPEELRCKRSDGKQWRCSAPSMPDKTVCEKHYVQAKKRAASSALRASLRRSSASASAARGTTPPARMAVARPIYGRVAGEPVYVAEPALPPPPPPPRRRQPVHGLPMGNAAGARTAAELVGRGSAGLVACSSAAGAAAAATCHQCRRVANTICCTSCDRRGYCTNCISRWYSDIPIDDVRKVCPACRGICNCRVCLLGDNVIKARVQEISAVDKLEYLHSILASVLPVLKQIYSDQCFEIGVDTKAYGLRTDIIRAKVNPDEQMCCDFCKVPVFDYHRHCPRCLYDLCLDCCRDIRRSRTSVARGEYAEGRVVDRSKDTSNKRARMEPSAESANDKSVPQRRDIKNIDIRSLFPTWRVNNDGSITCGPHEAGGCGSSKLVLRRIFKINWISKLVKNSEEMVNGCKVHVLENGCSSCNDGRTLELTGHRNFGVSTCSNNGGIDRFCVFSPVLEDLKSEGIIHFRKHWIKGEPVVIRNAFEPSLSSSWDPLNIWRGIQEIMDEEVDDDVIVKAVDCSNQAEVDIELKQFIKGYSDGHKGEDGELMMLKLKEWPPPSVLEEFLLCQRPEFIVNFPLVDFIHSRWGLLNLSAKLPPDTLQPEVGLKLLIAYGRHQEAGKGDSVTNLMINMADVVHMLMHTAKGHDVCPKRLQPERSEKIANGMTMHVNAHAPVQNLNVDMGEQSPDHVSSKFDERAHASALRLQEKSSDAKLNCGFEGSSTELSCSSHSEEPKVNGSERSQAGSVWDVFRRQDISKLNEYLTANWEELAASSQVKNPIYEQSIYLNKYHKRILKDQYGIEPWTFQQHIGEAVFVPAGCPFQVKNLQSTVQLALDFLSPESLGESARMAQEIRCLPNDHDAKLKMLEIGKISLYAASSAVREIQRITLDPKFNLDLKFEDQNLTQAVSENLARVTKQRNVPCS

SEQ ID NO: 149 - DNA, 2862 bp, Oryza sativa
atggcggcggggaacggccggatggaggcggcgctgggctgcctcgcggcgctccccgacgaggtgctctgcgccgtcgtcgacctcctcccgcccaccgacgtcggccgcctcgcctgcgtcagcagtgtcatgtacatactttgcaatgaggagcctctctggatgagcaagtgtctttcagttgggggtcttcttgtgtatagaggttcttggaagaaaacagcattgtctagacttaatctttgttcagaaaatgatgagatttaccagaagcctcgccattttgatgggttcaattccatgcacttatacaggagatggtacagatgttttactaatttgagtagcttttcctttgataatgggcacgttgaaaggaaagatgacctttctctagaccaatttcgcgctcagtatgatggaaaatgtccagttttgcttactaaactggctgaaacctggccagcaaggactaaatggacagcgcagcaactgacacatgattatggtgaagttccctttaggatatctcagagaagccctcaaaagataaaaatgaaactaaaagattatgttttttacatggaactccagcatgacgaagatccactttacatatttgatgataagtttggagaatcagcacctacactattggaagattacagtgtccctcatctatttcaagaagatttctttgaaatcatggattacgaccaacgaccagctttcagatggcttattattggaccagagagatcaggtgcttcttggcatgttgatccagggttgaccagtgcctggaatactcttctttgtggccgaaaaaggtgggcaatgtaccctcctggaagagtaccaggtggtgtcacagtacatgtcagtgatgaagatggtgatgttgacattgaaactcctacatctttgcagtggtggctagatatctacccaaatcttgctgagcatgagaaaccactggaatgcacacaattaccaggagagaccatatttgttcctagtgggtggtggcattgtgttttgaaccttgacatgacaattgctgtcacgcaaaattttgtcaaccaatcaaattttaagcatgtatgtttggacatggcacctggttactgtcacaaaggagtttgccgtgctggcttacttgctgctccagacaaatctattagagatattgaaaatcttcctagtataacgagtagattgaaccactctgacatggcctgtaaggaaaaaagactgaaaagttcagagcctataagaacttcaaataatgcaaatcagtgttctgcatttgagttctcagatgttcatgaaaacttgggggaccaagttttttcgtatgatatagatttcttatcccaattccttgagaaagaaaaggatcactattcttctgtctggagccctactaattcaattggccagagagaagcaagagaatggctacgtaggctatgggttcttaaacctgaattgagagaactaatatggaagggtgcatgtctagcaattaatgtagacaagtggtattcatgcttagaggaaataagtgcatgccatagtttaccaccaccttctgaagatgagaagcttcctgttggcacaggtagcaacccagtcttcattgtttctggcaatgtgatcaaaatttatgctgaaggagggttgggttattctatacatggtttgggcacagagcttgagttctatgatcttctgcaaaaacttggctcgccattgatcaaccatgtccctgagatcattgcaagtggctttcttgtgtacctggatggtgtctacaagacagttccatgggatggaaacggaataccagatgttctagctaaatactactctttggaggtgtcttatgcaaacggctcttttcctcttggattatggagcaagcaactgtttggattgagtaattcaactgatgctccagacagaccaatttgtccttacatggttaccagaaaatgcaaaggggatatttttgctcgcatacgtgataaattgaccaagactgatgttttgaatcttgcatcatccttgggagttcaaatgcgaaatattcatcaattaccccttccacatgtggaacacatatccaaatctgggaacgaagatatcaaagcaaaggaaaattcaatttctgatgtcactcatgttccgcctgaatggaaacaagtagtttctactctagacaggagaaagaaaagtataaagaagcatctaagtaactggggtggttcaattccacaggttctaattgagaaggctgaagaatatctccctgacgacatccgctttcttatcaagtttgttaaggacgatgatggtgattcagtctatgtggtaccttcttggatacattcagatataatggatgataacattctcattgaggggaccacagaaccaggaacttccactgattgcattgccgttgaagatctgaacaaaatggatgcaattcatatcattgatttcagtgatctgtccattggggatcctctatgtgacttaattccactgcacttggatgtattccgtggtgatattgatcttctcaggcagtttttacgaagctatcagcttccttttctgagagcagaatcaaataaagatatatacaagtcaatacaaaattctaaattcagcagggcatcgtatcgtgcgatgtgctactgcatacttcacgaggacaacgtcctgggagccatatttagcctgtggaaggatctgggcaccgcgacgtcatgggaagatgttgaacacttggtttggggagagctgaatcaataccagcagtcatgcagcgtgggcgaaattaactga

SEQ ID NO: 150 - protein, 953 aa, Oryza sativa
MAAGNGRMEAALGCLAALPDEVLCAVVDLLPPTDVGRLACVSSVMYILCNEEPLWMSKCLSVGGLLVYRGSWKKTALSRLNLCSENDEIYQKPRHFDGFNSMHLYRRWYRCFTNLSSFSFDNGHVERKDDLSLDQFRAQYDGKCPVLLTKLAETWPARTKWTAQQLTHDYGEVPFRISQRSPQKIKMKLKDYVFYMELQHDEDPLYIFDDKFGESAPTLLEDYSVPHLFQEDFFEIMDYDQRPAFRWLIIGPERSGASWHVDPGLTSAWNTLLCGRKRWAMYPPGRVPGGVTVHVSDEDGDVDIETPTSLQWWLDIYPNLAEHEKPLECTQLPGETIFVPSGWWHCVLNLDMTIAVTQNFVNQSNFKHVCLDMAPGYCHKGVCRAGLLAAPDKSIRDIENLPSITSRLNHSDMACKEKRLKSSEPIRTSNNANQCSAFEFSDVHENLGDQVFSYDIDFLSQFLEKEKDHYSSVWSPTNSIGQREAREWLRRLWVLKPELRELIWKGACLAINVDKWYSCLEEISACHSLPPPSEDEKLPVGTGSNPVFIVSGNVIKIYAEGGLGYSIHGLGTELEFYDLLQKLGSPLINHVPEIIASGFLVYLDGVYKTVPWDGNGIPDVLAKYYSLEVSYANGSFPLGLWSKQLFGLSNSTDAPDRPICPYMVTRKCKGDIFARIRDKLTKTDVLNLASSLGVQMRNIHQLPLPHVEHISKSGNEDIKAKENSISDVTHVPPEWKQVVSTLDRRKKSIKKHLSNWGGSIPQVLIEKAEEYLPDDIRFLIKFVKDDDGDSVYVVPSWIHSDIMDDNILIEGTTEPGTSTDCIAVEDLNKMDAIHIIDFSDLSIGDPLCDLIPLHLDVFRGDIDLLRQFLRSYQLPFLRAESNKDIYKSIQNSKFSRASYRAMCYCILHEDNVLGAIFSLWKDLGTATSWEDVEHLVWGELNQYQQSCSVGEIN

SEQ ID NO: 151 - DNA, 3171 bp, Oryza sativa
atggagatggaggaggcggtagacggcaagcacccgaagcgtgggaggggcaggccgaggggacgacggggcaggggcaggggcagggggaggggcggccgctccctcgcgtcgccggcggcggggcccggagaccaagggccgcggcggcggcgcggggtcgtcccggcggcggcggcggcggcggggggaagggcgctgagggagaggaggccggcgcctggtgcctaccgcgagagcggagctgataatgacgatgatggcggcggcgacgatgagcacgacgagcagaatgatgatggtgctgaaaaatcggataatcaagttgtggattctcttaatgaacccaacagaagtaatacagggaagaagcggggaagaccaaagaaagtgaaagcagagcaggaggacagtaaccaactctccaacgggaaacaccttggcgaaaacaatgggaatgatgaagcgataatgatgaagccttcaaaagaatcgaagaaaagaggtgcaggaaagaaacaagaggaagaagagaataataccatatccattgaggatgaaatgtgtgatgcgaacaataagaaggggaagaagatgctcactggggaaaatgctttgatgtgccaccagtgtcaaagaaatgacaaagggagggtgatttggtgtaaatcatgcaacaataagcgcttctgtgagccatgcatgaaacgatggtacccaggtttgtcagaagttgattttgctgcaaaatgcccatattgtagaaagaactgtaattgcaaggcatgcctaagaatgataggagttgaaaagccccctgaaaagaagatttctgaggaaaatcaacgacgttatgcttttcgtattgtagacttgttgcttccttggttgaaagaacttcaacaggagcagatgaaggagaaggaattagagggtagattacaaggtgtttctatggatgaagtaaagttggaacaagctgattgtgatatggatgagcgtgtttattgtgataggtgcaaaacttcgatagttgattttcatagaagctgcaaggcttgttcgtatgacttgtgccttgcatgctgctgggagcttcgcaaaggtgagattccaggaggagaagaggcaaagagtgtgcagtgggaagagagaggtcagaagtatgtttttggtaatatttccaaggatgagaagaaaagggtatcttcgaagaggcacatggagacccccagtactgaaacttgcaatgacatggctgttgctggggacccaaataaccctttgttactgtggaaagctaatagtgatggcagtataccttgtccaccaaaggaaatagggggctgcggtgcttcatctttggtactcagatgcttattaccagaaattatgctttctgagttagaacacagggctaacaaagttattaagagagaagcatttgataaagcaataaacgaaacaagtgatcagtgcccttgcttttatcacacaagcaagataagaacaaatgctactcgagaggcagcaaacagaaagggctcaagtgataactacttgtactgtccagatgccaataatatccaggaggatgacctgtcgcactttcagatgcattggtcaaaaggtgaaccggttattgtttctgatgctcttcggttaacatctggtctgagctgggagccattggttatgtggcgggcattgcgagagaagaaaaccaatggtgatgttgaagatgagcactttgctgttaaggcagtggattgccttgattggaatgaggtggaaattaacatacacatgttctttatggggtatatgagaggtagaagacatccgatgaccttttggcctgagatgcttaagctaaaagattggccaccatctagtatgtttgaccagaggttacctcgccatggtgctgagtttataactgcattgccatttcccgagtatactgatccacgatatggcccgctaaatcttgctgtcaggcttcctgctggtgtactgaagcctgatcttgggccaaaaacttatattgcttatggatgttatgaagagttaggcaggggtgactctgtgaccaagcttcattgcgacatgtctgatgcggtaaatatcttgatgcacacagctgaagtgtcctatgacactgaacagcttgacaagatagcaaaaattaaaatgaaaatgagagaacaagatcttcatgaactgtttggggtttcagaatcaggcgccaagggtaaagctgatgatgaagcatcgaaaatctcatgtaacatggaaaacaaacacacctctaaccaaagtactaagggtttggacattaatgctttaccacctgatgattctggaagtgatattggggataaaccatcattttgtcaatctgaggtagaaagtgaattaacacaatgttcaaaacacaatcacgaggttaatagttctgtcaagatgcatgctggagctcattgtacttcagacaaccaaggatacattgacaggagtggattcaaacgcaaagattcagactgttcagaccaacagaaaactggtggcgctttgtgggatattttccgaagagaagattctgagaagttacaagattatcttcggaagcatgcctcagaatttcggcacatacactgcaatccagtgaaaaatgtttctcacccaattcatgaccagactttctatttaactgtggagcataagagaaagctcaaggaagaacacggtgttgaaccatggacattcgagcagaagctaggcgatgcagttttcattcctgctggatgtccacaccaagtgagaaatttaaagtcttgcatcaaggttgctctagactttgtttcccctgaaaatgttggtgagtgtgttaagctgaccggagagtttagacgtcttccatctgatcacagggctaaagaagataaactagagattaagaagattgctctcaatgctcttaaagaagtcgtaaatttcttagatcctttaccaaaagggtcaaagaacagggatgaagtggtagaagtgaccaaaccaaaaaggaaatacggtaaccgaagaggtgacctgaagagtggggaagaccaacccattgatgaatccatagaagaaaggaagcctaaaaagcgagggagatctaaacggtga

SEQ ID NO: 152 - protein, 1056 aa, Oryza sativa
MEMEEAVDGKHPKRGRGRPRGRRGRGRGRGRGGRSLASPAAGPGDQGPRRRRGVVPAAAAAAGGRALRERRPAPGAYRESGADNDDDGGGDDEHDEQNDDGAEKSDNQVVDSLNEPNRSNTGKKRGRPKKVKAEQEDSNQLSNGKHLGENNGNDEAIMMKPSKESKKRGAGKKQEEEENNTISIEDEMCDANNKKGKKMLTGENALMCHQCQRNDKGRVIWCKSCNNKRFCEPCMKRWYPGLSEVDFAAKCPYCRKNCNCKACLRMIGVEKPPEKKISEENQRRYAFRIVDLLLPWLKELQQEQMKEKELEGRLQGVSMDEVKLEQADCDMDERVYCDRCKTSIVDFHRSCKACSYDLCLACCWELRKGEIPGGEEAKSVQWEERGQKYVFGNISKDEKKRVSSKRHMETPSTETCNDMAVAGDPNNPLLLWKANSDGSIPCPPKEIGGCGASSLVLRCLLPEIMLSELEHRANKVIKREAFDKAINETSDQCPCFYHTSKIRTNATREAANRKGSSDNYLYCPDANNIQEDDLSHFQMHWSKGEPVIVSDALRLTSGLSWEPLVMWRALREKKTNGDVEDEHFAVKAVDCLDWNEVEINIHMFFMGYMRGRRHPMTFWPEMLKLKDWPPSSMFDQRLPRHGAEFITALPFPEYTDPRYGPLNLAVRLPAGVLKPDLGPKTYIAYGCYEELGRGDSVTKLHCDMSDAVNILMHTAEVSYDTEQLDKIAKIKMKMREQDLHELFGVSESGAKGKADDEASKISCNMENKHTSNQSTKGLDINALPPDDSGSDIGDKPSFCQSEVESELTQCSKHNHEVNSSVKMHAGAHCTSDNQGYIDRSGFKRKDSDCSDQQKTGGALWDIFRREDSEKLQDYLRKHASEFRHIHCNPVKNVSHPIHDQTFYLTVEHKRKLKEEHGVEPWTFEQKLGDAVFIPAGCPHQVRNLKSCIKVALDFVSPENVGECVKLTGEFRRLPSDHRAKEDKLEIKKIALNALKEVVNFLDPLPKGSKNRDEVVEVTKPKRKYGNRRGDLKSGEDQPIDESIEERKPKKRGRSKR

SEQ ID NO: 153 - DNA, 3159 bp, Oryza sativa
atggagatggaggaggcggtagacggcaagcacccgaagcgtgggaggggcaggccgaggggacgacggggcaggggcaggggcagggggaggggcggccgctccctcgcgtcgccggcggcggggcccggagaccaagggccgcggcggcggcgcggggtcgtcccggcggcggcggcggcggcggggggaagggcgctgagggagaggaggccggcgcctggtgcctaccgcgagagcggagctgataatgacgatgatggcggcggcgacgatgagcacgacgagcagaatgatgatggtgctgaaaaatcggataatcaagttgtggattctcttaatgaacccaacagaagtaatacagggaagaagcggggaagaccaaagaaagtgaaagcagagcaggaggacagtaaccaactctccaacgggaaacaccttggcgaaaacaatgggaatgatgaagcgataatgatgaagccttcaaaagaatcgaagaaaagaggtgcaggaaagaaacaagaggaagaagagaataataccatatccattgaggatgaaatgtgtgatgcgaacaataagaaggggaagaagatgctcactggggaaaatgctttgatgtgccaccagtgtcaaagaaatgacaaagggagggtgatttggtgtaaatcatgcaacaataagcgcttctgtgagccatgcatgaaacgatggtacccaggtttgtcagaagttgattttgctgcaaaatgcccatattgtagaaagaactgtaattgcaaggcatgcctaagaatgataggagttgaaaagccccctgaaaagaagatttctgaggaaaatcaacgacgttatgcttttcgtattgtagacttgttgcttccttggttgaaagaacttcaacaggagcagatgaaggagaaggaattagagggtagattacaaggtgtttctatggatgaagtaaagttggaacaagctgattgtgatatggatgagcgtgtttattgtgataggtgcaaaacttcgatagttgattttcatagaagctgcaaggcttgttcgtatgacttgtgccttgcatgctgctgggagcttcgcaaaggtgagattccaggaggagaagaggcaaagagtgtgcagtgggaagagagaggtcagaagtatgtttttggtaatatttccaaggatgagaagaaaagggtatcttcgaagaggcacatggagacccccagtactgaaacttgcaatgacatggctgttgctggggacccaaataaccctttgttactgtggaaagctaatagtgatggcagtataccttgtccaccaaaggaaatagggggctgcggtgcttcatctttggtactcagatgcttattaccagaaattatgctttctgagttagaacacagggctaacaaagttattaagagagaagcatttgataaagcaataaacgaaacaagtgatcagtgcccttgcttttatcacacaagcaagataagaacaaatgctactcgagaggcagcaaacagaaagggctcaagtgataactacttgtactgtccagatgccaataatatccaggaggatgacctgtcgcactttcagatgcattggtcaaaaggtgaaccggttattgtttctgatgctcttcggttaacatctggtctgagctgggagccattggttatgtggcgggcattgcgagagaagaaaaccaatggtgatgttgaagatgagcactttgctgttaaggcagtggattgccttgattggaatgaggtggaaattaacatacacatgttctttatggggtatatgagaggtagaagacatccgatgaccttttggcctgagatgcttaagctaaaagattggccaccatctagtatgtttgaccagaggttacctcgccatggtgctgagtttataactgcattgccatttcccgagtatactgatccacgatatggcccgctaaatcttgctgtcaggcttcctgctggtgtactgaagcctgatcttgggccaaaaacttatattgcttatggatgttatgaagagttaggcaggggtgactctgtgaccaagcttcattgcgacatgtctgatgcggtaaatatcttgatgcacacagctgaagtgtcctatgacactgaacagcttgacaagatagcaaaaattaaaatgaaaatgagagaacaagatcttcatgaactgtttggggtttcagaatcaggcgccaagggtaaagctgatgatgaagcatcgaaaatctcatgtaacatggaaaacaaacacacctctaaccaaagtactaagggtttggacattaatgctttaccacctgatgattctggaagtgatattggggataaaccatcattttgtcaatctgaggtagaaagtgaattaacacaatgttcaaaacacaatcacgaggttaatagttctgtcaagatgcatgctggagctcattgtacttcagacaaccaaggatacattgacaggagtggattcaaacgcaaagattcagactgttcagaccaacagaaaactggtggcgctttgtgggatattttccgaagagaagattctgagaagttacaagattatcttcggaagcatgcctcagaatttcggcacatacactgcaatccagtgaaaaatgtttctcacccaattcatgaccagactttctatttaactgtggagcataagagaaagctcaaggaagaacacggtgttgaaccatggacattcgagcagaagctaggcgatgcagttttcattcctgctggatgtccacaccaagtgagaaatttaaagtcttgcatcaaggttgctctagactttgtttcccctgaaaatgttggtgagtgtgttaagctgaccggagagtttagacgtcttccatctgatcacagggctaaagaagataaactagagattaagaagattgctctcaatgctcttaaagaagtcgtaaatttcttagatcctttaccaaaaggggatgaagtggtagaagtgaccaaaccaaaaaggaaatacggtaaccgaagaggtgacctgaagagtggggaagaccaacccattgatgaatccatagaagaaaggaagcctaaaaagcgagggagatctaaacggtga

SEQ ID NO: 154 - protein, 1052 aa, Oryza sativa
MEMEEAVDGKHPKRGRGRPRGRRGRGRGRGRGGRSLASPAAGPGDQGPRRRRGVVPAAAAAAGGRALRERRPAPGAYRESGADNDDDGGGDDEHDEQNDDGAEKSDNQVVDSLNEPNRSNTGKKRGRPKKVKAEQEDSNQLSNGKHLGENNGNDEAIMMKPSKESKKRGAGKKQEEEENNTISIEDEMCDANNKKGKKMLTGENALMCHQCQRNDKGRVIWCKSCNNKRFCEPCMKRWYPGLSEVDFAAKCPYCRKNCNCKACLRMIGVEKPPEKKISEENQRRYAFRIVDLLLPWLKELQQEQMKEKELEGRLQGVSMDEVKLEQADCDMDERVYCDRCKTSIVDFHRSCKACSYDLCLACCWELRKGEIPGGEEAKSVQWEERGQKYVFGNISKDEKKRVSSKRHMETPSTETCNDMAVAGDPNNPLLLWKANSDGSIPCPPKEIGGCGASSLVLRCLLPEIMLSELEHRANKVIKREAFDKAINETSDQCPCFYHTSKIRTNATREAANRKGSSDNYLYCPDANNIQEDDLSHFQMHWSKGEPVIVSDALRLTSGLSWEPLVMWRALREKKTNGDVEDEHFAVKAVDCLDWNEVEINIHMFFMGYMRGRRHPMTFWPEMLKLKDWPPSSMFDQRLPRHGAEFITALPFPEYTDPRYGPLNLAVRLPAGVLKPDLGPKTYIAYGCYEELGRGDSVTKLHCDMSDAVNILMHTAEVSYDTEQLDKIAKIKMKMREQDLHELFGVSESGAKGKADDEASKISCNMENKHTSNQSTKGLDINALPPDDSGSDIGDKPSFCQSEVESELTQCSKHNHEVNSSVKMHAGAHCTSDNQGYIDRSGFKRKDSDCSDQQKTGGALWDIFRREDSEKLQDYLRKHASEFRHIHCNPVKNVSHPIHDQTFYLTVEHKRKLKEEHGVEPWTFEQKLGDAVFIPAGCPHQVRNLKSCIKVALDFVSPENVGECVKLTGEFRRLPSDHRAKEDKLEIKKIALNALKEVVNFLDPLPKGDEVVEVTKPKRKYGNRRGDLKSGEDQPIDESIEERKPKKRGRSKR

SEQ ID NO: 155 - DNA, 3717 bp, Oryza sativa
atgatgggggttaccaccacgctcaacgaggacactgaaccctctattccacctggatttggaccttttgctacccttccgttatggggaatccacaatgatgccaaacctgctgttactcattctactcctgttcaagcattgcaaagcattagaaaagacagcgaagaatgccaacccagtgcggctgtgtctcggagtgatacaccttgcagcacttccggaacccagacatgcagaaaatcactgcgtaacagacccccaatagactatagccgctttgaacatatatcggatgaagattctgatgtcgaaatagtggaaaaggatgtaagttcaacgagacgcagacaacagctaccgaaaggagtacttcgaggatgtgcagaatgcagtgactgtcaaaaggttatcgcaaaatggaatccagctggtgcacgcaggcctgttcttgatgaggctcctgttttctatccaacagaggaggaatttgaagacactctaaaatacattgagagtatacggccaatggcggaaccatatggtatttgccgtattgtcccaccatcttcttggaagcctccatgccttcttaaagataaaagcatatgggaaggatcaaaattctctactcgggtacaaaaggttgacaagctccaaaaccgtaaatcatcaaaaaagggcagaagaggtggaatgatgaagaggagaaagcttgcagagtcagaggagaacagtgccactgctcacactcagacagggatgcagcaaagtccagagagatttggatttgaacctgggccagagttcacgttacagacatttcagaaatatgcagatgatttcagtaagcagtactttaggaaagatacatcgatggattcagtaccatcagtggaagatattgaaggtgagtactggcgcatcgttgaggttcccacagaagagatagaggtgatatatggtgctgatctggagactggaactttcggcagtggttttccaaaattatctcctgagacaaaatctgatgctgaggataaatatgcacaatctggttggaatctaaataacttgcctagactacaaggttcagttctttctttcgagggcggtgacatttctggtgttctagtgccttgggtgtatgttggcatgtgtttttcatcattctgctggcatgttgaagaccatcatttatactcactaaactacatgcattggggtgccccaaagttgtggtatggagttccaggaaaggatgctgtgaatttggaatctgcaatgaggaaacatctacctgaattatttgaggagcaacctgatttgctacacaaccttgttacccagttttcaccatcgctgctgaaatctgaaggagtacatgtataccgttgtgttcagcatgagggcgagtttgtcttgacattcccaagggcgtaccatgctggtttcaattgtggcttcaattgtgccgaagctgttaatgtggctcctattgattggttaccgattggacataatgctgtagagctttatcgtgagcaagctaggaaaataaccatttctcatgataagttgttgttgggggctgcaagagaagcaataagagctcagtgggatatcctattcctcaagaggaatactgctgataatatgaggtggaagagtatatgcggagctgatagcactatattcaaggctcttaaggcacgaattgagacagagttggtgcaaaggaaaactctaggtgttccagctcaatcaaggaaaatggatgctgaattcgattccattgatagggaatgtgccttgtgctactatgatttacatctttctgcttctggctgtccatgctgcccagagaaatatgcttgccttgtacatgcaaagcaactttgctcatgtgactgggacaaaaggtttttcctattccgctatgatgtcaatgagctaaatatcttagctgatgctttaggggggaaattaagtgccattcatagatggggcgtctctgatcttggattaagtttgagttcatgtgtcaaacgagaaaaggtccaagattccaagactgttcgcagattaactgatggtccaagaaggtcttacatgtcacaggcatcagcagtatccttggtttcttcttctacttccaatgaacagaaagatgaaggaaataagatcatgaagatagctagcccacagacaaataatgtgtgcccttctgtcgagcaaaggaaatcagagaatatttcaccattgaaggagccatgtgtaaggaatgagttgtcatgtacaacaaattctgatagtaacggattgcaatataatggaggacttggaggccataaaggatctgcaccaggcttgccagtttcttctagcccatcattttcttccaacgttgcaacaaggcccattagtacttcaagtgtatccatgaaaattgtgcaaggcttggtggcatctaaaagttgtatacaagcttcctctcgaactggagacagtagatcattgcttggtgagcatcataacagatcaccggcaatgattcatgatggaaccaacatgaagtccagtttggaaagctcaaacaattcttgcaggttgattgcatctgactataatgcaactccgtgtcattcatccaaggatcaggtattagtaacaccagggactaatgcctcagtagtgactctgaaagatagcagccaggtccatagtgcgtcaagtcagcagtttgtcagaactggcccatggacacaaagtgcttctcatgaagcatcatcacctagtacctctgctttgaagccttctttagatccccctgccatgaaaaatctgtatgggggttttactcaaggcagtgcccatcctggacctccaagtttcagtaatcagcaaccaaatgatgggcgtcttcaaagaacatctgaatctctaccaggtgtggaagctagagctaggggacatccaactgtcacggcacagcctgcactagaaattcacagcaggaatggaggtgcacagaagggtcctcgcatagccaatgttgtgcatcgtttcaagtgctctgttgaacctctcgaaattggtgttgtgctatcagggaggctgtggtcttcaagccaagcaatcttcccgaaagggtttagaagcagagtgaaatacttcagcattgtggatccaatccaaatggcatactacatatcggaaatactggatgctgggatgcaggggcctctgtttatggtaaaattagagaactgtccaggtgaagttttcattaacttatctccaaccaagtgttggaacatggtccgtgaaaggctgaacatggaaataaggaggcaacttaatatgggaaaatcaaatcttcctacattgcagcctccaggatcagttgatggtcttgaaatgtttggtttattatcaccaccaatagttcaggcaatttgggcgcgggacagagatcacatctgtacagagtactggagatcaaggccccatgttctcattgaggatccaaacaatcggcatatgttatctcagggtccacctctccttgccctgaggggtctcatccaaagggctaaccgggatgaattgcaagtcctgcggagtttgatgacgaacagcaacaatttggatgatagctccaggcaacaggccgcgcacattatcgaagaggagattgcgaagcaattgtgctga

SEQ ID NO: 156 - protein, 1238 aa, Oryza sativa
MMGVTTTLNEDTEPSIPPGFGPFATLPLWGIHNDAKPAVTHSTPVQALQSIRKDSEECQPSAAVSRSDTPCSTSGTQTCRKSLRNRPPIDYSRFEHISDEDSDVEIVEKDVSSTRRRQQLPKGVLRGCAECSDCQKVIAKWNPAGARRPVLDEAPVFYPTEEEFEDTLKYIESIRPMAEPYGICRIVPPSSWKPPCLLKDKSIWEGSKFSTRVQKVDKLQNRKSSKKGRRGGMMKRRKLAESEENSATAHTQTGMQQSPERFGFEPGPEFTLQTFQKYADDFSKQYFRKDTSMDSVPSVEDIEGEYWRIVEVPTEEIEVIYGADLETGTFGSGFPKLSPETKSDAEDKYAQSGWNLNNLPRLQGSVLSFEGGDISGVLVPWVYVGMCFSSFCWHVEDHHLYSLNYMHWGAPKLWYGVPGKDAVNLESAMRKHLPELFEEQPDLLHNLVTQFSPSLLKSEGVHVYRCVQHEGEFVLTFPRAYHAGFNCGFNCAEAVNVAPIDWLPIGHNAVELYREQARKITISHDKLLLGAAREAIRAQWDILFLKRNTADNMRWKSICGADSTIFKALKARIETELVQRKTLGVPAQSRKMDAEFDSIDRECALCYYDLHLSASGCPCCPEKYACLVHAKQLCSCDWDKRFFLFRYDVNELNILADALGGKLSAIHRWGVSDLGLSLSSCVKREKVQDSKTVRRLTDGPRRSYMSQASAVSLVSSSTSNEQKDEGNKIMKIASPQTNNVCPSVEQRKSENISPLKEPCVRNELSCTTNSDSNGLQYNGGLGGHKGSAPGLPVSSSPSFSSNVATRPISTSSVSMKIVQGLVASKSCIQASSRTGDSRSLLGEHHNRSPAMIHDGTNMKSSLESSNNSCRLIASDYNATPCHSSKDQVLVTPGTNASVVTLKDSSQVHSASSQQFVRTGPWTQSASHEASSPSTSALKPSLDPPAMKNLYGGFTQGSAHPGPPSFSNQQPNDGRLQRTSESLPGVEARARGHPTVTAQPALEIHSRNGGAQKGPRIANVVHRFKCSVEPLEIGVVLSGRLWSSSQAIFPKGFRSRVKYFSIVDPIQMAYYISEILDAGMQGPLFMVKLENCPGEVFINLSPTKCWNMVRERLNMEIRRQLNMGKSNLPTLQPPGSVDGLEMFGLLSPPIVQAIWARDRDHICTEYWRSRPHVLIEDPNNRHMLSQGPPLLALRGLIQRANRDELQVLRSLMTNSNNLDDSSRQQAAHIIEEEIAKQLC

SEQ ID NO: 157 - DNA, 2916 bp, Oryza sativa
atggtttcctcccgcgaccccggcgaggaggccagcgcgccgccgcccccgcccccgcgccgcggcgagaagcggcgaatgcgcggccgcaccccgtcgccggagccggcctccgcgccgcaggatctctgcccatcaggagcttgcggggacaatgttgctggagctacaactacaaatggaaagtggcatccacatgaatcgtacagacctgaaattgatgatgcccctgttttcactccaacggaagaggagtttaaagatccaattagatatattacgagcattcgtccccaagcagaaaagtatggaatttgtcgtattgttccaccatcttcttggcgaccgccttgttctctgaaggagaagaacttctgggaatgtacagagttcaatacccgtgttcaacaagttgacaagcttcaaaaccgggaacccacaaagaaaaaatcacaacctcgagttcagaagaagaggaagaggagaaagagactgagatttgggatgactcacaggcgtcctagtgcaaatacatcagaagactgcgcagatgcagacgagaagtttggctttcaatctggctcagatttcacactagatgagtttcagaaatatgcagatgagtttaagcagcagtattttggaataaagggaagtgacgaaatccctctttctgaaattaaaaagaagaaaaaaaattggcaaccatcggtcgatgaaatagagggagaatattggcggatagttgtatgccccactgacgaagttgaggtggattatggtgctgatttggacacttcaatgttcagtagtggattctctaaattatcttcagattcaaatagacgagatccatatggtttatcttgttggaatttgaacaatcttccacgtattcctgggtctgtactgtcatttgaaactgaggatatatctggcgtcgtagtcccttggctttatgtagggatgtgcttctcatcattctgttggcacgtggaagatcatttcctttattctatgaattacatgcattttggtgaaccaaaagtatggtatggtgttcctggtgctgatgcagtgaagctggaagaagctatgagaaagaacttaccaagattgtttgaagaacagcctgatctcctacatgagctggttacgcaattatctccttctgttcttaaatcagaaggagttcctgtttatcgtgttgttcagaatccaggcgagtttgttctaacgctaccgcgagcttaccattctgggttcaactgtggcttcaactgtgcggaggcagtaaatgtcgcacctgtggattggctgcctcacggacaatgtgctgttgagctctacagggagcagcggcgcaagacatccatatcacatgacaaattattactaaaaactgcaaatgaagctgtcagacagctttggatgaaccttagcgactgcaaaagtgaacaaggagtatacagatggcaggatacttgcggaaaggacggaatgctgacaagtgcaattaagacaagggttaaaatggagaaggcagcacggggagggaatatggcactgcgatataagaaaatggatggggattatgattcagctgaccgggaatgcttttcatgtttttatgatctccatttgtcagctgtcagctgccaatgctccccaaatcgttttgcttgcttaaaccatgcaaacattctatgttcatgtgaaatggacagaaaaaccgcgttgttgcggtataccatagaggagctccatactcttgttgcagctctagagggtgatccaactgcggtctaccagtggggacagaatgatttaggtttagtctgcccatctggttctactcagtacaagaagatggacttgggtgaaaacacggaatttccggattcagcaaccaacgtcaatcatggctgcagcttaggaagtcaagatcaatatcactatgaccccgcaaagccagcaggataccagcaagagaagggaatccagattgcttcagaaaaacatgataagaacaagatggttgtcaatcttgagtctccagcaacagctagtaatccaagcaggtcaaagtctgactgcagtggctcactgtccttgaatcattcatctgagttaccatcttcaagaattcaaacaggaaattctacgctagcttccattaccacagagaaactgtttggtgttgacattaaatccaatttagcacagtcttctgatggccaagttagtcaattggccaagccttcctcgagccaaactgatgaagtctctaagccagcaatagctaagtatacggttgagctgctagacagtggaacaatgatgattggtaaaaagtggtgcaatcagcaagctatattccccaaaggatttaagagtcgagttacatttcatagtgtactagatccaacaaggacatgctgctacatctccgaagttcttgatgctgggcttcttggaccattgtttagggtgactgtcgaaggtcttccagaagtttcgtttactcacacatcaccaatgcaatgttgggacagtgtaagagacagagtaaatgaagaaatagcaaaacaaataagttttggaaaatctggccttcctgattttctatcctgcaattctttgaatggacttgaaatgtttgggttcttatcctcccctataattaaggaaatcgaggctctagatccctgtcaccaatgcttggactattggttgtcaagggtttcttctgttggaactgaactcccctcggaatctgtgatggcagcaatggttaatgactccactaaccccccaataaagttgctcgggattgagattaaccggagggaatcagaacaatcaagtagcttcaataattcctgtgtgaggaggtcacacttggcaggttgctga

SEQ ID NO: 158 - protein, 971 aa, Oryza sativa
MVSSRDPGEEASAPPPPPPRRGEKRRMRGRTPSPEPASAPQDLCPSGACGDNVAGATTTNGKWHPHESYRPEIDDAPVFTPTEEEFKDPIRYITSIRPQAEKYGICRIVPPSSWRPPCSLKEKNFWECTEFNTRVQQVDKLQNREPTKKKSQPRVQKKRKRRKRLRFGMTHRRPSANTSEDCADADEKFGFQSGSDFTLDEFQKYADEFKQQYFGIKGSDEIPLSEIKKKKKNWQPSVDEIEGEYWRIVVCPTDEVEVDYGADLDTSMFSSGFSKLSSDSNRRDPYGLSCWNLNNLPRIPGSVLSFETEDISGVVVPWLYVGMCFSSFCWHVEDHFLYSMNYMHFGEPKVWYGVPGADAVKLEEAMRKNLPRLFEEQPDLLHELVTQLSPSVLKSEGVPVYRVVQNPGEFVLTLPRAYHSGFNCGFNCAEAVNVAPVDWLPHGQCAVELYREQRRKTSISHDKLLLKTANEAVRQLWMNLSDCKSEQGVYRWQDTCGKDGMLTSAIKTRVKMEKAARGGNMALRYKKMDGDYDSADRECFSCFYDLHLSAVSCQCSPNRFACLNHANILCSCEMDRKTALLRYTIEELHTLVAALEGDPTAVYQWGQNDLGLVCPSGSTQYKKMDLGENTEFPDSATNVNHGCSLGSQDQYHYDPAKPAGYQQEKGIQIASEKHDKNKMVVNLESPATASNPSRSKSDCSGSLSLNHSSELPSSRIQTGNSTLASITTEKLFGVDIKSNLAQSSDGQVSQLAKPSSSQTDEVSKPAIAKYTVELLDSGTMMIGKKWCNQQAIFPKGFKSRVTFHSVLDPTRTCCYISEVLDAGLLGPLFRVTVEGLPEVSFTHTSPMQCWDSVRDRVNEEIAKQISFGKSGLPDFLSCNSLNGLEMFGFLSSPIIKEIEALDPCHQCLDYWLSRVSSVGTELPSESVMAAMVNDSTNPPIKLLGIEINRRESEQSSSFNNSCVRRSHLAGC

SEQ ID NO: 159 - DNA, 1140 bp, Oryza sativa
atgtcatgtttgagttgggagccaccagatatgtggtctaaagtacatggcaccggcactagtcctgagatgaaaaacgtgaaggctattgattgtttatcttgctgtgaggtcgagatatgcactcaagacttcttcaatgggtattatgaaggtcggatgtatcaaaatctatggcctgaaatgcttaaattgaaggactggcctacatcaaatcattttgaagagcttttgccttcccatggagttaaatacatgaattctttaccttttcaaccatacacaaacttgaagtctggtttgctgaatgtctcaaccttgcttcctgatgacatcttaaagcttgacatgggcccaaaatcatatatagcttatggctatgcacaggaacttggtagaggagattctgttacaaagcttcactgcgatttgtctgatgcagttaacgttttgatgcatactgctgaagttgacccttccgaggaacaaatagatgcaataaaaagtttgaaaagaagacatacagcgcaaaatgaaaaggagtgttctgggaatgcagacggaaattatacatctcctaaaatctgtggggatgcaaatgagttgtcctgtcctataaacagtgagaccaacaagggaggtgctttatgggatatttttaggagggaagatgttccaaaactgaaattgtatctcgacaagcattctaaggaatttcgccatatatactgttctgcagttcaaaaggtatgtaaccctgtacatgatgaaacattttatctaacagaagaacacaagagaaaactcaaggaggagcatggaattgagccttggacatttgtacaaaaacttggggaggcagtattcattcctgctgggtgtcctcatcaagtacggaatcttaagtcctgcaccaagattgccttggattttgtatcacccgagaatgttaaggagtgtctcagcttaaccgaggacttccgaagacttcctaagaaccacagggccaaagaagacaaattagagctaggtgtggttcaaaatggacccaagcccacataccctcgagaaactattctaaactctcaatgggacatcttgttgtttgcatatcatccaaatagttatgacaaagtttaa

SEQ ID NO: 160 - protein, 379 aa, Oryza sativa
MSCLSWEPPDMWSKVHGTGTSPEMKNVKAIDCLSCCEVEICTQDFFNGYYEGRMYQNLWPEMLKLKDWPTSNHFEELLPSHGVKYMNSLPFQPYTNLKSGLLNVSTLLPDDILKLDMGPKSYIAYGYAQELGRGDSVTKLHCDLSDAVNVLMHTAEVDPSEEQIDAIKSLKRRHTAQNEKECSGNADGNYTSPKICGDANELSCPINSETNKGGALWDIFRREDVPKLKLYLDKHSKEFRHIYCSAVQKVCNPVHDETFYLTEEHKRKLKEEHGIEPWTFVQKLGEAVFIPAGCPHQVRNLKSCTKIALDFVSPENVKECLSLTEDFRRLPKNHRAKEDKLELGVVQNGPKPTYPRETILNSQWDILLFAYHPNSYDKV

SEQ ID NO: 161 - DNA, 2577 bp, Oryza sativa
atgcaacaggtggagggcaggaactgtcttcctgcggaggtcaggattggcctcgagacgctcaagaggcgccggcttgagaggatgcgtttgactgctcagaacaatgccggcgacggtcctccggtgcccgcaaggagcggtggggatgcgctaaggactcccgcaaactgcggggtcaggttgcatgctaacaatggcacagctctacctagcagaaccacccagaacaaggacccttttgcaaagcgcagggtggacaagtttgatatgtctagcctagaatggattgacaagatcgaagaatgccctgtgtactatcctaccaaggaggagttcgaggatcccattggttatatacagaagattgcacctgtggcttcgaaatacggaatttgcaaaatcgtatctccagtaagcgcttctgttcctgctggtgtcgtgttgatgaaggaacagcctggtttcaagttcatgaccagggttcagccgcttcgcctcgccaaatgggctgaagatgacacggtcactttcttcatgagcgaaagaaagtacactttccgggattatgagaaaatggccaacaaggtgttcgccaagaaatactcaagtgctagttgtctcccagctaagtacgtggaggaggaattctggcgcgaaattgcttttggtaaaatggattttgttgaatatgcctgtgatgttgatggtagtgctttctcctcttctcctcatgatcaacttgggaaaagcaactggaacttgaagaatttttcacggctttccaattctgtgcttagacttctgcagacaccaattccaggagtaacagatccaatgctttatatcgggatgctcttcagcatgtttgcttggcatgtggaagatcattatttgtacagcatcaattaccatcattgtggggcatttaagacatggtatggcataccgggtgatgctgctcctgggtttgaaaaggtggctagccagtttgtatacaacaaggatattttggttggtgaaggagaggatgcagcatttgatgttctcttggggaagacaacaatgttccccccaaatgtcttgttagaccacaacgttcctgtttataaagctgtgcaaaaacctggggagtttgtcattactttccctcgttcctaccacgcgggtttcagccacggcttcaattgtggcgaggctgtcaactttgctatcagtgactggtttcctctgggttctgtggccagcagacgctacgcgcttctgaacagaacacccttgcttgcacacgaggagttactttgccgttctgcagtgcttctgtcccacaaactgttaaacagcgacccaaaatccctcaataaatctgagcatccacattcacagcgttgtttgaagtcttgctttgtgcagttgatgcgattccagagaaacacacgtggcctacttgctaaaatgggctctcagatacattataagccaaaaacatacccgaatctctcatgtagcatgtgtcggcgtgattgctacattacacatgtgttgtgtggatgcaactttgacccagtctgtcttcatcacgaacaagaactccggagctgcccttgtaaatctaaccaggttgtctacgttagggaggacatacaggagctagaagctctatcaagaaaatttgagaaggatatttgcttggataaggaaataagtggttttgactcatacaagcaggccgaaaagaatgagccattttttgagataactcggaacctcaggaacactgaagtaaatttgatagaggatgccttctcaggagcaactgctgctgatgctgcaaagagttctcctgcaacgtcaacactgacatcttttgcacaacatgatgtgcctgttcttgctgaagcaattgtctgtgctaatcaagccgaccaattatactccaccaccgagcaaaccatcagctcacctttagtcaaaggaactgatgctgtgggtgcaaattcatccagcatggctgatgctaataacggaactggttcttgtaatgcttcagctgtggaatacagtggaaattcagattctgaatctgaaatatttcgagtcaagcgcaggtctggcgtatcagtaaagcctgcatctgatgccaagacatcaaacttgtctgatcaacaggttctcaggcggttgaagaaggtgcgccctgaaatacaacagcacaataagcgaccagaagactatggtcactgttcagttccctcaggtcgtatgagtatgaagaatttgaattcatcctcctcatgtggtgaagaacactggaggatgaagcggcggcagttggagactcagcaggatgagagcagttattctgcaaagcagaagtcgtactcgtatccatccaccagctattctttccgaggagagtttgtggaaatgagtagagatgctgctgcagaagtccgaccaaagcgactgaaaatccggctaccttcttctagcacgaacagagtggttgagcagggcagttcagggcaaagatttacaagggatgacaagtcgcttggttgttggcctgcaatttag

SEQ ID NO: 162 - protein, 858 aa, Oryza sativa
MQQVEGRNCLPAEVRIGLETLKRRRLERMRLTAQNNAGDGPPVPARSGGDALRTPANCGVRLHANNGTALPSRTTQNKDPFAKRRVDKFDMSSLEWIDKIEECPVYYPTKEEFEDPIGYIQKIAPVASKYGICKIVSPVSASVPAGVVLMKEQPGFKFMTRVQPLRLAKWAEDDTVTFFMSERKYTFRDYEKMANKVFAKKYSSASCLPAKYVEEEFWREIAFGKMDFVEYACDVDGSAFSSSPHDQLGKSNWNLKNFSRLSNSVLRLLQTPIPGVTDPMLYIGMLFSMFAWHVEDHYLYSINYHHCGAFKTWYGIPGDAAPGFEKVASQFVYNKDILVGEGEDAAFDVLLGKTTMFPPNVLLDHNVPVYKAVQKPGEFVITFPRSYHAGFSHGFNCGEAVNFAISDWFPLGSVASRRYALLNRTPLLAHEELLCRSAVLLSHKLLNSDPKSLNKSEHPHSQRCLKSCFVQLMRFQRNTRGLLAKMGSQIHYKPKTYPNLSCSMCRRDCYITHVLCGCNFDPVCLHHEQELRSCPCKSNQVVYVREDIQELEALSRKFEKDICLDKEISGFDSYKQAEKNEPFFEITRNLRNTEVNLIEDAFSGATAADAAKSSPATSTLTSFAQHDVPVLAEAIVCANQADQLYSTTEQTISSPLVKGTDAVGANSSSMADANNGTGSCNASAVEYSGNSDSESEIFRVKRRSGVSVKPASDAKTSNLSDQQVLRRLKKVRPEIQQHNKRPEDYGHCSVPSGRMSMKNLNSSSSCGEEHWRMKRRQLETQQDESSYSAKQKSYSYPSTSYSFRGEFVEMSRDAAAEVRPKRLKIRLPSSSTNRVVEQGSSGQRFTRDDKSLGCWPAI

SEQ ID NO: 163 - DNA, 1566 bp, Oryza sativa
atgccgagcgccttccactccctcctcctccccgccattcgcaaccccaaacctagccgtcgccgcggccgcggccgcggcggcagcaaacgccccaagaagaccaccaaatccaagaaccgcctcgccgacgccgccgccggagacgccaccgccttccacctgaagacctccgcgcgcgccggtccggggggtgccgggagcggccggcgaggcgatgggggatgcctcgtgcagccgctcggcaacctcctcctcctcggcggcggcggcaacctccgcgacgcggggctcggcgcgctccgcccgctccccgacgacgtcctcctcgacgtgctcggcctgctcgcggcgcgcgacctcgctaggctctccgcggcgtcgagggcgctctacgtcgtcgcctcccacgacccgctctggcgggcgctcgtcctcgacgagctcggcggggacttcgccttctcgggctcgtggcgcgccacctacatcgccgccgcgtcgggcggccgcgcccacctccccccgcggggcctagagatcagggggttctactccgactacctcttccagagctggctctgcgccaacatggagatgcggccggagtggctccaccgggacaccatcgatcgccgccgcggcatgtccgtcgagcaattcgtctccgaattcgaggagcccaataggccggtgcttctggaaggctgcctcgagagctggccagcattgcagaagtggaccagggagcacttgctgaaggtctcggccgggaaggagttcgccgtcgggccggtgagcatgacgctggataggtacctccagtatgccgacaatgtgcaggaggagaggccattgtacctgttcgatgccaagttcaccgagaaggtgccggagatggggagggactatgaggtgccggcgtacttccgagaggacctattcggggtgcttggggaggaaaggccggaccaccgatgggttatcattgggccggcaggttcagggtcgtcgtttcatgttgatccaaactcgacatcggcgtggaatgctgtgatcaagggagccaagaagtgggtgatgttcccaccggaggtggtgccgccaggagttcatccaagtgcggatggagcagaagtcactagccctgtatctatcatggaatggttcatgaatttttatggggcatgtaagacctgggaaaagaggcctgttgagtgtatatgccgggctggagaggtggtttttgtgcctaatggatggtggcatttggttatcaatctggaggaatctattgcgattactcagaattatgtgagcaggaggaatctgttgaatgttcttgactttctcaagaggcccaatgcaagtgaacttgtatcagggactacagacagggtaaacctgcatgacaagttccgcaatgccatcgatatgacttatcctgggatgattaaacagcttgaacttgaagctcagcagaaggctgctgctcgcaagaagaaagtctcgttctgggaatctgcggtagatgccaatactggaggattcaagttctcattctga

SEQ ID NO: 164 - protein, 521 aa, Oryza sativa
MPSAFHSLLLPAIRNPKPSRRRGRGRGGSKRPKKTTKSKNRLADAAAGDATAFHLKTSARAGPGGAGSGRRGDGGCLVQPLGNLLLLGGGGNLRDAGLGALRPLPDDVLLDVLGLLAARDLARLSAASRALYVVASHDPLWRALVLDELGGDFAFSGSWRATYIAAASGGRAHLPPRGLEIRGFYSDYLFQSWLCANMEMRPEWLHRDTIDRRRGMSVEQFVSEFEEPNRPVLLEGCLESWPALQKWTREHLLKVSAGKEFAVGPVSMTLDRYLQYADNVQEERPLYLFDAKFTEKVPEMGRDYEVPAYFREDLFGVLGEERPDHRWVIIGPAGSGSSFHVDPNSTSAWNAVIKGAKKWVMFPPEVVPPGVHPSADGAEVTSPVSIMEWFMNFYGACKTWEKRPVECICRAGEVVFVPNGWWHLVINLEESIAITQNYVSRRNLLNVLDFLKRPNASELVSGTTDRVNLHDKFRNAIDMTYPGMIKQLELEAQQKAAARKKKVSFWESAVDANTGGFKFSF

SEQ ID NO: 165 - DNA, 432 bp, Oryza sativa
atggtggcagacagcgcggtcggcgtgcacggcagtgcggccgacagtgggtcggtgcggtcggcgcggacggcggcagagagggacgcggaggcggaggctacgcgggacacaaaggcagcggcggtggagccgccagagtggctgcagaccctgcccgtggcgccggagtaccacccgacgctggtggagttcgccgaccccatcgcctacatcctcaggatcaagcccgaggcgtcccgcaacggcatttgcaagatccaggtcggcctctccaccaagaaccgccgtgccgccagccgccgagtgtgggagagcggggagcgctacaccctggaggcgttctgcgccaaggtgcccgagttcgagccctcgaggcacgccgcactgcccaagaaccccacccacctccagctcaaggccctcttctag

SEQ ID NO: 166 - protein, 143 aa, Oryza sativa
MVADSAVGVHGSAADSGSVRSARTAAERDAEAEATRDTKAAAVEPPEWLQTLPVAPEYHPTLVEFADPIAYILRIKPEASRNGICKIQVGLSTKNRRAASRRVWESGERYTLEAFCAKVPEFEPSRHAALPKNPTHLQLKALF

SEQ ID NO: 167 - DNA, 4101 bp, Oryza sativa
atgtcgctgcagccgccggcggtggagccgccggagtggctgcggacgctgcccgtggcgccggagtaccacccgacgctggcggagttcgccgaccccatcgcctacatcctcaggatcgagccggaggcgtcccgctacggcatctgcaagatcgtgcccccgctcccgcggccccccgaggacgacaccttccgccgcctccaggccgccttcgccgccgcggcctcctccaatggcgacccctccccgaccttccccacgcggctccagcaggtcggcctctccgccaggaaccgccgcgccgccagccgccgggtgtgggagagcggggagcgctacaccctggaggcgttccgcgccaaggcggccgagttcgagcccccgaggcacgccgcgccgcccaggaaccccacccacctccagctcgaggccctcttctgggccgcctgcgcctccaggcccttcagcgtcgagtacggcaacgacatgcccggctccggcttcgcctcccccgacgagctccccgacgccgccaatgccaccgacgtcggggagacggagtggaacatgcgggtggcgccccgcgcccgggggtcgctgctccgcgccatggcccgcgacgtggcgggcgtcaccaccccgatgctgtacgtggccatgctctacagctggttcgcctggcacgtggaggaccacgagctccacagcctcaacttcctccacttcggcaaggccaagacctggtacggcgtcccccgcgacgccatgctcgccttcgaggagacggtgcgcgtccacggctacgccgacgacctcaacgccatcatggcctttcaaacgttaaatgagaagacaactgtcttatctcctgaggtgcttctttctgctggtgttccctgctgcagattggttcaaaaagcgggagaatttgttatcacattccctggagcttatcattcaggctttagccatggatttaattgtggggaagcatcaaatattgcaactccccattggttacaagtggctaaagaagctgcaatccggagggcttcaactaattgtggtccgatggtgtctcattatcagctgctttatgagctagcactctcattgcgtccaagggagcctaagaatttctattctgttccaagaagctcacgtttaagggacaagaataagaatgaaggtgatataatggtcaaagaaaattttgttggaagtgtaaccgaaaacaacaatttgcttagcgcccttctggataagaattcttgtataattgttccaaacgctgatttcttcgttccatcctttcctgttgcactggaatctgaagttactgttaaacaaaggtttacagctggtccctgcagtattagccagcaaggagcagaaaatatggctgctgatcatgtggctgtagacaaggttacagagattcaggacatgagtggatccttatatccttgtgaaaccagtcttgtgggctgtagcaatagaaaactttatgaaacaaaatatggccaacgggatgctgctgctttgtgcttatctacttcagagattcagagcagaggaattgatacagcaagatcacatccagcaggcgggatcttagatcaaggacggttgccatgtgtacagtgcggaatactaagctttgcatgtgtagccatcattcaacctagagaagcagcagtacagtttatcatgtctaaagagtgcatctcatcgagtgcaaaacaaggaggaattggtgcatctgatgatacctcaaactggattgaccagagtcatgagattagtcctccaccaggtccagcatctggaacagatgataatgtaaagcatgccgtaagtttggcccatgtctctgatcggtgtagagaactatatgccagcaatacagatggatgcacctctgctcttgggcttctagcttctgcatatgactcatcagactctgatgatgaaacaactgaggatgtttcaaaacatagcaagaaaaatgattcagtaaaccaaagcacggatcctcaaatcttggaaacatcagctagctgttccagtacagttcagtgtcaaaagacaaattcacacttgcatgaagaggaatgtgaggcaagagccacatcattgatgaaacctgtaagccataatagtaggcccattagtcagtctaacagggatacagatatcgaccattttatagaactgggaaagtcaggaacacagtgttcaggttatcttgatttggttgatgatctaactacatcagttttaaaatcctcttcagatacttgtgtaagtgcagctaaagcctcaatggatccagatgttttgaccatgctcaggtacaataaagactcttgcagaatgcatgtgttttgtcttgaacatgctttggaaacatggacacagcttcaacaaatcggtggtgctaatattatgcttttgtgccatccagaataccctagagcagagtcagcagcaaaagtcatagcagaagaacttggtatcaagcatgattggaaagatatcactttcaaagaagcaactgaagaggacgttaaaaagattcagttggctttacaggatgaagatgctgaacccactggcagtgactgggcagtcaaaatgggtatcaacatatattacagtgccaaacagagcaaatcaccactttacagcaagcagataccatacaattccatcatttataaggcatttggccaagaaaacccagacagtttgacagattatggatgtcaaaagtcaggctcaacaaagaaaaaggtggctgggtggtggtgtgggaaagtttggatgtcaaatcaagttcatccacttctagctcgtgagcgtgaagaacagaacagtagcgtagtgtacggcaaagcaatgttcactactatttcccatggcaaagtacaagatgaagcgtcaacaagatgcaatacaagcaaccgaaccccatcaagaagaacatcaagaagaaaaaagggggtatctgctgagaaatctaaaccaaaaaacaagagatccactgcttctgatgaagctagtatgctttgcagtggccttggaatgaactctggagttatccatgaccaaactgaaaactctgatgattatgacaaacatggcaatggagatgaaattgaggaaggaacaaatcctcagaaatatcaacaacgtaaattgcaaaacgtgaccaggaaatcaagttctaagaagcggaaggatgagaaaagaacagatagttttcatgaactatatgacgaggataatggtgtggattattggcttaacatgggtagtggagatgatgccacactaggtaactctcgacaacaaagtcctgatccagtgaaagtgaaatctggaggcaaattgcaaggtaagagaaaatctagcaagtacaagtccaatgatgatttgttgaatgaagaaaataagttacaaaagatgaacaaaaaatcaagctctaagaagcaaaagaatgataagataaatagacaacttcaagaagatcaaaccgaagatgaccatatggaccacttagttgacgtagcggttgcagatgaagtcacactagacaatgaggataaaattacagaagacaaaattgatgacgtgaaagtgaaatctagaggaaaatcgcaaaatggtaagagaaaaggcagcaaacatcaggctaccgatggtttgcgcgctggaaataaagtggccaaatttccgtgtgatatagaaggatgtgacatgagcttcagtacccagcaggacttgttattgcataagcgtgacatttgtcctgtcaaaggatgcaagaagaagttcttctgccacaagtacttgcttcagcaccggaaggtgcatatagatgaaaggccacttaagtgtacatggaaggggtgtaagaaggcattcaagtggccatgggcgaggacggagcacatgagagtccatacgggggtaagaccttacgagtgccaggaacctggctgtggtcagacattccgattcgtttcagatttcagccgccacaagagaaagactggccattcctctgataagagaagaaagaacagtacataa

SEQ ID NO: 168 - protein, 1366 aa, Oryza sativa
MSLQPPAVEPPEWLRTLPVAPEYHPTLAEFADPIAYILRIEPEASRYGICKIVPPLPRPPEDDTFRRLQAAFAAAASSNGDPSPTFPTRLQQVGLSARNRRAASRRVWESGERYTLEAFRAKAAEFEPPRHAAPPRNPTHLQLEALFWAACASRPFSVEYGNDMPGSGFASPDELPDAANATDVGETEWNMRVAPRARGSLLRAMARDVAGVTTPMLYVAMLYSWFAWHVEDHELHSLNFLHFGKAKTWYGVPRDAMLAFEETVRVHGYADDLNAIMAFQTLNEKTTVLSPEVLLSAGVPCCRLVQKAGEFVITFPGAYHSGFSHGFNCGEASNIATPHWLQVAKEAAIRRASTNCGPMVSHYQLLYELALSLRPREPKNFYSVPRSSRLRDKNKNEGDIMVKENFVGSVTENNNLLSALLDKNSCIIVPNADFFVPSFPVALESEVTVKQRFTAGPCSISQQGAENMAADHVAVDKVTEIQDMSGSLYPCETSLVGCSNRKLYETKYGQRDAAALCLSTSEIQSRGIDTARSHPAGGILDQGRLPCVQCGILSFACVAIIQPREAAVQFIMSKECISSSAKQGGIGASDDTSNWIDQSHEISPPPGPASGTDDNVKHAVSLAHVSDRCRELYASNTDGCTSALGLLASAYDSSDSDDETTEDVSKHSKKNDSVNQSTDPQILETSASCSSTVQCQKTNSHLHEEECEARATSLMKPVSHNSRPISQSNRDTDIDHFIELGKSGTQCSGYLDLVDDLTTSVLKSSSDTCVSAAKASMDPDVLTMLRYNKDSCRMHVFCLEHALETWTQLQQIGGANIMLLCHPEYPRAESAAKVIAEELGIKHDWKDITFKEATEEDVKKIQLALQDEDAEPTGSDWAVKMGINIYYSAKQSKSPLYSKQIPYNSIIYKAFGQENPDSLTDYGCQKSGSTKKKVAGWWCGKVWMSNQVHPLLAREREEQNSSVVYGKAMFTTISHGKVQDEASTRCNTSNRTPSRRTSRRKKGVSAEKSKPKNKRSTASDEASMLCSGLGMNSGVIHDQTENSDDYDKHGNGDEIEEGTNPQKYQQRKLQNVTRKSSSKKRKDEKRTDSFHELYDEDNGVDYWLNMGSGDDATLGNSRQQSPDPVKVKSGGKLQGKRKSSKYKSNDDLLNEENKLQKMNKKSSSKKQKNDKINRQLQEDQTEDDHMDHLVDVAVADEVTLDNEDKITEDKIDDVKVKSRGKSQNGKRKGSKHQATDGLRAGNKVAKFPCDIEGCDMSFSTQQDLLLHKRDICPVKGCKKKFFCHKYLLQHRKVHIDERPLKCTWKGCKKAFKWPWARTEHMRVHTGVRPYECQEPGCGQTFRFVSDFSRHKRKTGHSSDKRRKNST

SEQ ID NO: 169 - DNA, 1242 bp, Glycine max
atgttgacgacaactgtatccggcggcgaccctccttctcgcggttttgatacgccgacgctggaccgggaagcggcggcgctgctccacgcgatctccgagcatggcgggtacgcgtacgtgagcatggcggtgctggcttccggcggcgacattcgcgcggcggaggcggcgtgggagatggcgtgggagcagctgcactcgggtccgtggcactcggtgctgccggtgtggcgcgacgcttactccatggcgtgcctccacgtggcgcgccaccactacggcaacggtgagttcttggacgcacttagggttttggatttgggaatcatcatgggaggcacgctcctccgcaaggatttggactccgccatcgagaaaatgtcggaacaaacgaggaagaccgttagggtttctgatttggggaactccgagcaccgactcgtcgatcgcgaatttgatatggcagaggtgctccaacttttacctgtgaagtctctttcaacgaaacttgtggtgaagaaatcggcgctgtccttggagaaattcctgaaggatcattacctgtctggctgcccggttattatcagtgattgtatgtctcactggccagccaagatgaaatggaatgacgaagattacttgctgagagttgccggagaccgtacagttccagttgaggttgggaaaaactatttatgtactgagtggaagcaagagctaattactttttcagagtttcttcagcggataaagtctgatagctgttctcctggtggtcctacatatcttgctcagcatccattatttgatcagataaatgagcttcggaaagatatctttattcctgactattgttttactggtggaggggagctacgatctctcaatgcttggtttggtccagcaggaacagtaacaccgttacaccatgatccacatcataacatactagctcaggttgttggaaagaaatacattaggctatactcttcgtctttatctgaggaactttccccccactctggtaccatgctccacaactccagccaggttgatttagatgatatggatgaaaagaagtttccgaaggtgcaagacttggaatttgtagactgtattttagaggaaggcgaaatgttatatatcccgccaaaatggtggcactatgtgcggtctttgactaccagtttttcggttagcttttggtggagtgagggtgaaagttcggatgcatcctaa

SEQ ID NO: 170 - protein, 413 aa, Glycine max
MLTTTVSGGDPPSRGFDTPTLDREAAALLHAISEHGGYAYVSMAVLASGGDIRAAEAAWEMAWEQLHSGPWHSVLPVWRDAYSMACLHVARHHYGNGEFLDALRVLDLGIIMGGTLLRKDLDSAIEKMSEQTRKTVRVSDLGNSEHRLVDREFDMAEVLQLLPVKSLSTKLVVKKSALSLEKFLKDHYLSGCPVIISDCMSHWPAKMKWNDEDYLLRVAGDRTVPVEVGKNYLCTEWKQELITFSEFLQRIKSDSCSPGGPTYLAQHPLFDQINELRKDIFIPDYCFTGGGELRSLNAWFGPAGTVTPLHHDPHHNILAQVVGKKYIRLYSSSLSEELSPHSGTMLHNSSQVDLDDMDEKKFPKVQDLEFVDCILEEGEMLYIPPKWWHYVRSLTTSFSVSFWWSEGESSDAS

SEQ ID NO: 171 - DNA, 1464 bp, Arabidopsis thaliana
cttagtcaatagcatcttctccgatcatcgacgtccggagatttcttcggccctctcatacttgagttgttgtaggatttgttgctctggctctggtggtaggtctatgaaatcaacccatatcgtgaatggactgcaacatggtatcttcgtcccagtgggattgggagcatttgatcatgtccaatccgtcaaggactgaagatgacagcaaacagctacctactgagtgggaaattgaaaaaggtgaaggaattgaatctatagttccacatttctcaggccttgagagagtcagtagtggctctgccaccagcttctggcacactgctgtatcgaaaagctcacagtcgacctctatcaactcatcatctcccgaagccaaacgatgcaagcttgcatcagaaagttcccctggagattcttgcagcaacatagactttgtccaggtgaaggctcccacagctctcgaggtatccgttgcctcagctgaatcagatctttgtttaaaactaggaaagcggacatactctgaagaatactggggtagaaacaataatgaaatttcagcggtttctatgaagttgttaactccatctgttgtcgctgggaaatccaaattgtgtggtcagagcatgccagtcccgcgttgccaaattgatggctgtgaactggatctctcatctgctaagggttatcatcgtaagcacaaagtctgcgaaaagcattcaaagtgcccaaaagttagcgtgagtggcctggaacgtcggttctgccaacagtgtagcaggttccatgctgtctctgaatttgatgagaagaaacgaagctgccgaaaacgtctttctcatcataatgcgaggcgtcgtaagccacaaggagtattttcaatgaatcccgagagggtgtatgatcgaagacagcatacaaatatgttgtggaatggggtgtcccttaacgcgagatctgaagaaatgtatgaatggggtaataacacttatgatacaaagcctagacaaacggaaaaaagctttactctgagcttccagagaggtaatggctctgaggaccagctggttgctagtagcagccgtatgttctctacatctcaaacctcaggtgggttcccagcaggaaagtccaagtttcaacttcatggcgaagatgtgggagaatactcaggagtcctccatgaatctcaagatatccaccgtgctctctctcttctgtcaacctcttcggatcccctggcccaaccacatgtgcagccattttctctactctgttcatatgatgttgtaccaaaatagatgagtaagtaatgtgtaatttgtaaacctgttactcagttggtggatacttttccaaacctatgataaaaacctcgtcctagatcccgttaaatgccaaactttcggctactataactatgttatcgttatcattatcattgtttaacaccct

SEQ ID NO: 172 - protein, 393 aa, Arabidopsis thaliana
MDCNMVSSSQWDWEHLIMSNPSRTEDDSKQLPTEWEIEKGEGIESIVPHFSGLERVSSGSATSFWHTAVSKSSQSTSINSSSPEAKRCKLASESSPGDSCSNIDFVQVKAPTALEVSVASAESDLCLKLGKRTYSEEYWGRNNNEISAVSMKLLTPSVVAGKSKLCGQSMPVPRCQIDGCELDLSSAKGYHRKHKVCEKHSKCPKVSVSGLERRFCQQCSRFHAVSEFDEKKRSCRKRLSHHNARRRKPQGVFSMNPERVYDRRQHTNMLWNGVSLNARSEEMYEWGNNTYDTKPRQTEKSFTLSFQRGNGSEDQLVASSSRMFSTSQTSGGFPAGKSKFQLHGEDVGEYSGVLHESQDIHRALSLLSTSSDPLAQPHVQPFSLLCSYDVVPK

SEQ ID NO: 173 - DNA, 2124 bp, Nicotiana tabacum
gtacaaaaaagcaggctggtaccggtccggaattcccgggatatcgtcgacccacgcgtccgccgtgatgtaatcttggtgatgctacttattcccttttcccttcttgagcccaaactcaagaaggtcaaaaacaaaaaaattacaaaaagctggaatcttgcagtttttttatttaatttatttatcctatgttgaattaatttttggggtcaatatttcccaatttgtagtctccaatggagcctcgtgttggtaataagttccggcttggccggaaaatcggtagcggttcttttggagagatctatctcggcgctaatgttcaaactaacgaagaggttgcaattaagctggaaaatgtgaaaacaaagcatcctcaactattatacgaagcaaagttgtataaaatactacaaggaggaactggaatccccaatttaaaatggtttggagttgaaggagattataatgcccttgtgatggatttgctggggcctagtcttgaagatctcttcaacttctgcagtaggaagctgtctttaaagaccgttctcatgctcgcagatcagatgattaatcgggttgaatttgttcatgccaaatcttttcttcatcgagatataaaacctgacaactttcttatgggattaggaagacgtgcaaatcaggtctatatgattgattttgggctggccaagaagtatagagactcatcaactcatcagcatattccgtatagagaaaacaaaaatttgacaggaactgctagatacgcaagcatgaatactcatcttggcattgaacaaagtcgaagggatgatttggaatcgctgggttatgttttaatgtacttcttaagaggaagtctcccttggcaggggctgaaagcaggcactaagaaacagaagtatgagaagatcagtgagaagaaagtatcaacatcaatagagaccttgtgtaggggatatcctgcagagtttgcatcatattttcattactgtcgatcactaagatttgatgataaaccagattatgcttatctgaagagaattttccgtgatcttttcattcgtgaagggtttcaatttgattatatatttgactggaccattttgaaatatcagcaatcacagcttgccaatcctccatctcgtgctcttggtggtactgctgggccaagctcagggatgcctcatgctcttgttaatgttgagaggcaatcaggtggagatgaaggtcgaccaactggttggtcttcatcaaatcttacacgtaataagagcacggggctgcatttcaattctggaagcttattgaagcaaaaaggcacagttgctaatgatttatccatgggtaaagagttatccagttctaattttttccggtcaagtggaccattgaggcgtccagttgtctctagcatccgagacccagtgattgcagggggtgaacctgacccctccggcactctgacaaaagatgcaagcccgggaccattgcgtaaagtatccagtgctgcacggaggagttcaccagttgtgtcctcagatcacaagcgcagctcctctatcaaaaatgccaacataaagaatttagagtccaccgtcaagggaatagagggtttaagttttcgatgatgagggactgcattagtagctgtgctttgtctcagttctccgttcactgtaaattttggcacaccaacttggggagtaagagttctgatattagttgctgtcaggaagtaccataaagctgaattatacaattaaaatttgggatccaatcgcaaaagcacattaaggatatgatggggttgcagatccaaactcacagattccagtttatgctcgtccatacagttataggcactttccatattcttttctttaatctctgtctcttgcttgttattgttatgtcgtggtattcttgttgaggtcatgtttgtgaattgcgaagatggtcatgtataattgccgagaaatcatgtactagtttgttttaaacatgagcaaactgttattttgttcaagctactttaatatcaaaaaaaaaaaaaaaagggcggccgctctagagtatccctcgaggggcccaagcttacgcgtacccagcttt

SEQ ID NO: 174 - protein, 466 aa, Nicotiana tabacum
MEPRVGNKFRLGRKIGSGSFGEIYLGANVQTNEEVAIKLENVKTKHPQLLYEAKLYKILQGGTGIPNLKWFGVEGDYNALVMDLLGPSLEDLFNFCSRKLSLKTVLMLADQMINRVEFVHAKSFLHRDIKPDNFLMGLGRRANQVYMIDFGLAKKYRDSSTHQHIPYRENKNLTGTARYASMNTHLGIEQSRRDDLESLGYVLMYFLRGSLPWQGLKAGTKKQKYEKISEKKVSTSIETLCRGYPAEFASYFHYCRSLRFDDKPDYAYLKRIFRDLFIREGFQFDYIFDWTILKYQQSQLANPPSRALGGTAGPSSGMPHALVNVERQSGGDEGRPTGWSSSNLTRNKSTGLHFNSGSLLKQKGTVANDLSMGKELSSSNFFRSSGPLRRPVVSSIRDPVIAGGEPDPSGTLTKDASPGPLRKVSSAARRSSPVVSSDHKRSSSIKNANIKNLESTVKGIEGLSFR

SEQ ID NO: 175 - DNA, 1828 bp, Oryza sativa
gcttgagtcatagggagaaaacaaatcgatcatatttgactcttttccctccatctctcttaccggcaaaaaaagtagtactggtttatatgtaaagtaagattctttaattatgtgagatccggcttaatgcttttcttttgtcacatatactgcattgcaacaattgccatatattcacttctgccatcccattatatagcaactcaagaatggattgatatatcccctattactaatctagacatgttaaggctgagttgggcagtccatcttcccaacccaccaccttcgtttttcgcgcacatacttttcaaactactaaatggtgtgttttttaaaaatattttcaatacaaaagttgctttaaaaaattatattgatccatttttttaaaaaaaatagctaatacttaattaatcacgtgttaaaagaccgctccgttttgcgtgcaggagggataggttcacatcctgcattaccgaacacagcctaaatcttgttgtctagattcgtagtactggatatattaaatcatgttctaagttactatatactgagatgaatagaataagtaaaattagacccaccttaagtcttgatgaagttactactagctgcgtttgggaggacttcccaaaaaaaaaagtattagccattagcacgtgattaattaagtactagtttaaaaaacttaaaaaataaattaatatgattctcttaagtaactctcctatagaaaacttttacaaaattacaccgtttaatagtttggaaaatatgtcagtaaaaaataagagagtagaagttatgaaagttagaaaaagaattgttttagtagtatacagttataaactattccctctgttctaaaacataagggattatggatggattcgacatgtaccagtaccatgaatcgaatccagacaagttttttatgcatatttattctactataatatatcacatctgctctaaatatcttatatttcgaggtggagactgtcgctatgtttttctgcccgttgctaagcacacgccacccccgatgcggggacgcctctggccttcttgccacgataattgaatggaacttccacattcagattcgataggtgaccgtcgactccaagtgctttgcacaaaacaactccggcctcccggccaccagtcacacgactcacggcactaccacccctgactccctgaggcggacctgccactgttctgcatgcgaagctatctaaaattctgaagcaaagaaagcacagcacatgctccgggacacgcgccacccggcggaaaagggctcggtgtggcgatctcacagccgcatatcgcatttcacaagccgcccatctccaccggcttcacgaggctcatcgcggcacgaccgcgcacggaacgcacgcggccgacccgcgcgcctcgatgcgcgagcccatccgccgcgtcctccctttgcctttgccgctatcctctcggtcgtatcccgtttctctgtcttttgctccccggcgcgcgccagttcggagtaccagcgaaacccggacacctggtacacctccgccggccacaacgcgtgtcccccctacgtggccgcgcagcacatgcccatgcgcgacacgtgcacctcctcatccaaactctcaagtctcaacggtcctataaatgcacggatagcctcaagctgctcgtcacaaggcaagaggcaagaggcaagagcatccgtattaaccagccttttgagacttgagagtgtgtgtgactcgatccagcgtagtttcagttcgtgtgttggtgagtgattccagccaagtttgcg

SEQ ID NO: 176 - DNA, 2194 bp, Oryza sativa; identical to SEQ ID NO: 10

SEQ ID NO: 177 - DNA, 56 bp, Artificial sequence
  primer: prm8667
ggggacaagtttgtacaaaaaagcaggcttaaacaatggactgcaacatggtatct

SEQ ID NO: 178 - DNA, 54 bp, Artificial sequence
  primer: prm8668
ggggaccactttgtacaagaaagctgggtcacattacttactcatctattttgg

SEQ ID NO: 179 - DNA, 2046 bp, Oryza sativa
atgaataccccagaaaagaaaccactgtgctatacttctagaagagcactgcaacagaggacagaatcctcttcggaattgatctctgtatcaaaaagagcaacccgccagaatactccacgcaagccggattctcctcccaaacgaacaacaagaagtagcgctaacctggcgaaatgtatagagaacaaacaccatagcagtcctctgaagcggcggcggggttcagatgcggctaccggaaagtctgcaacagggccaacaaggaggaagcataaacagaaaaggaaaaatgatgagagtgatgaggtcagtcgcatggaaaaaagagcaagatatttacttatcaaaataaaacaggagcagaatttgctagatgcatactctggagatggttggaatgggcacagtcgagagaaaataaagccagagaaggagctacagcgtgctaagaaacagatcatgaaatacaaaatcgctatccgtgacgtcattcaccaacttgatttgtgtagttccagtgggagcaaggatgactctgtgattccaccagatgggtgtcacgagtctgtcaatcctgaacatacaatatgttcaaggtgcaaatcccacgagtcatttcctgacaataacattatattctgtgaggggggctgcaaactggcgtgtcatcagaaatgtttggagcctccttttgataaaattcttccaactacccgccatgggcggctttgcaaacactgttcttccaagatgaaaattttagacgccattaatgcccatctggggacaagttttacagtgaagtgtccctccagtgatattttcaaggaagcagctgaacatttcaactctgatgatggactgggccaagattggctatctgagtattcaggtgatgaggactatgaccctgaagaaaatgaggccagcagcagtggtgaagagaataaatctgccgattccaattgttcagggagtccactttattctccaaatgatgatattccagacttcatatcagcagatttcaatgatgctgaaggattctgtcgtgaaagttcaaatctaggaatcgattttggtgaagatggtttggctgagattcttacccaccaaaggccaagaagagatgttgactatacacaacttaatgagcaaatgtttggagagcctattggcaatgacgaacagagtgaagatgaagattggggtcttaacaagagaaagaaaagaagaactggttcaactggtgttgggactaattccgtagagggtcgatcagatgtcaaatccaataagaaagcccaacctcggagaaaacttttcaggattcctcctgcggcagttgaggtgctccgtaaagcttttgctgaaaatgagcttcctgcccggagtgtcaaagaaaatctctcaacagagctgggtatttcttttgaaaagattgataagtggttcaaaaatacacggtgtgctgctctcagggataggaagggtgaaagtcgttattctggtcccagcaaaaggtcaagaacaagcatagaaaaggctgaaacttcagctaaagtggatcaaatggacaactcatgctttcttcccttatctgaaataatcaacgtgcccacacgtctgcagaaaggtcttgataagaagccaaaatcaattaacagccctccaagacctcaggacaatgaaacttgcttgtcgccaactgataaaaccaaggagggtacaccgcctacgatcaagccttccatcacagattctagtcaactgatgaataacgacatcggcactgaggagactgctgtttcttgggtggacacttgggcctctgacgctctgcatttcttggacgtgagcgatgatgaacatttcttcgatgtgatcgagaaggtgtgcggtctcgagaatcggctgcagcggttgaaggagaacatgctatcatcgtcatcgtcaactgacaacaatgtggctgctgagagtggcttgcaaaacgaagttgtgcttgtaccagctgctgagctcaaggataaagcatcttaa

SEQ ID NO: 180 - protein, 681 aa, Oryza sativa
MNTPEKKPLCYTSRRALQQRTESSSELISVSKRATRQNTPRKPDSPPKRTTRSSANLAKCIENKHHSSPLKRRRGSDAATGKSATGPTRRKHKQKRKNDESDEVSRMEKRARYLLIKIKQEQNLLDAYSGDGWNGHSREKIKPEKELQRAKKQIMKYKIAIRDVIHQLDLCSSSGSKDDSVIPPDGCHESVNPEHTICSRCKSHESFPDNNIIFCEGGCKLACHQKCLEPPFDKILPTTRHGRLCKHCSSKMKILDAINAHLGTSFTVKCPSSDIFKEAAEHFNSDDGLGQDWLSEYSGDEDYDPEENEASSSGEENKSADSNCSGSPLYSPNDDIPDFISADFNDAEGFCRESSNLGIDFGEDGLAEILTHQRPRRDVDYTQLNEQMFGEPIGNDEQSEDEDWGLNKRKKRRTGSTGVGTNSVEGRSDVKSNKKAQPRRKLFRIPPAAVEVLRKAFAENELPARSVKENLSTELGISFEKIDKWFKNTRCAALRDRKGESRYSGPSKRSRTSIEKAETSAKVDQMDNSCFLPLSEIINVPTRLQKGLDKKPKSINSPPRPQDNETCLSPTDKTKEGTPPTIKPSITDSSQLMNNDIGTEETAVSWVDTWASDALHFLDVSDDEHFFDVIEKVCGLENRLQRLKENMLSSSSSTDNNVAAESGLQNEVVLVPAAELKDKAS

SEQ ID NO: 181 - DNA, 2391 bp, Arabidopsis thaliana
atggaggagagtgaaacaaaggggagaatcagtcaagaaactgataaggcttgtgtttcagttgagagaattgggtctactttactctcatcatttgtgaagaaaggtaaagaagtatcaaataagagaaattctaagcagaataagcgaaaagcggaagaagaactctgttcgaaatcaagaaccaagaagtactctcggggatgggtccgttgtgaggaaatggaggaggagaaggttaagaaaacaagaaagaggaaaagtaagagacagcaaaaggataataaggttgaggttgatgattctttaaggttgcaaaggaggacaaggtatttgctcattaagatgaagatgcagcagaatcttatcgatgcatacgcaactgaaggttggaaaggtcagagccgggaaaagataagaccagacaaggagcttgagagagcccggaaagagatcttaaactgcaagcttggactacgcgacgccattcgccaactggatctgcttagttctgtgggaagcatggaagagaaagtgatagcttcagatggatctattcatcatgatcatatattttgtgcagaatgcaattctcgagaagcttttccagacaatgatataatactttgtgatggaacgtgtaatcgagcatttcaccagaaatgccttgaccctcctttggaaacagaaagcatacctcccggagatcagggctggttttgcaaattttgtgattgcaaaattgaaattatcgacacaatgaatgcacaaattggaactcatttccctgtggacagcaactggcaggatatcttcaatgaagaagctagtcttcctattggatctgaagctacagttaacaatgaagcagattggccttcggatgactccaaggatgatgattatgaccctgaaatgagggaaaacggtggaggaaacagcagcaacgttagtggtgatggtggtggtgataacgatgaagaaagcatttcaactagcttgagcttatcatctgatggtgttgccctttcaacgggatcatgggaaggccatagactcagcaatatggtggagcagtgcgaaacaagtaatgaagaaactgtatgtgggccaagacagcgaaggactgttgactatacacagttgtactatgaaatgtttggaaaggatgcagttttgcaagagcaaggtagtgaagatgaagactggggtccgaatgacagaaggaagagaaaaagggaatctgatgcaggaagcacacttgtaactatgtgtgaaagcagtaagaaagatcaagatgttgtagaaacgctagaacagagtgagagagattctgtctctgtggaaaataaaggaggtcgaaggcggatgttcagactcccaagaaatgcagttgagaagctacgtcaagtatttgcagagactgagcttccctcaaaagctgtgagggatcgtcttgcaaaagagctgagtcttgatccagagaaggtcaataaatggtttaaaaatactcggtatatggcactgcggaataggaagactgagagcgtgaaacaacctggggattctaagacagtctctggaggagattctggaccagaagcagtcatggagaacaacactgaaacaaatgaagttcaagatactttggatgacactgttccacccggatttgacgctacaaatcaaaacatactctccccatgtaataacaaccaggaggaatttcaacaggaaaatgtctcttttccttcacccacagatgaaagtcaacagtatctggaacaaaacgattcttctttcgttctagtgccacatgaaaagcaaagcagcgaaattagcttaaagacggctgtagaggagaatgagacagaaagcaagatgatgaaagagccacatgaagagctaagcagtgaaatgagcctaaagacggctgctgaggagaaggagacagagagcaagatgatagaagagccacatgaagagctaagcagagaaatgagcttaaagacggctgtagaggagaaggagacagagagcaagatgatggaagagccacatgatgagctaaacagcgaaatgagcttaagtacagcggtagaggagaaggagacagggagcaagatgacggaagagtcacatgaagagctaagcaacgaaatgagcttagaagagaaggagacggggagaaagatgacggaagaggaagaattggaagcagtaatggagatgctttgtagaacagaaaacaagttactggacgtgacgcagaggcttgatagatttaaaacaccaaaaggccgaaaaaagttaggcaattcttcttctcctttacttgaagaagactcagtagtgtatgttccaatagcagagatcaaggagaaaaggtaa

SEQ ID NO: 182 - protein, 796 aa, Arabidopsis thaliana
MEESETKGRISQETDKACVSVERIGSTLLSSFVKKGKEVSNKRNSKQNKRKAEEELCSKSRTKKYSRGWVRCEEMEEEKVKKTRKRKSKRQQKDNKVEVDDSLRLQRRTRYLLIKMKMQQNLIDAYATEGWKGQSREKIRPDKELERARKEILNCKLGLRDAIRQLDLLSSVGSMEEKVIASDGSIHHDHIFCAECNSREAFPDNDIILCDGTCNRAFHQKCLDPPLETESIPPGDQGWFCKFCDCKIEIIDTMNAQIGTHFPVDSNWQDIFNEEASLPIGSEATVNNEADWPSDDSKDDDYDPEMRENGGGNSSNVSGDGGGDNDEESISTSLSLSSDGVALSTGSWEGHRLSNMVEQCETSNEETVCGPRQRRTVDYTQLYYEMFGKDAVLQEQGSEDEDWGPNDRRKRKRESDAGSTLVTMCESSKKDQDVVETLEQSERDSVSVENKGGRRRMFRLPRNAVEKLRQVFAETELPSKAVRDRLAKELSLDPEKVNKWFKNTRYMALRNRKTESVKQPGDSKTVSGGDSGPEAVMENNTETNEVQDTLDDTVPPGFDATNQNILSPCNNNQEEFQQENVSFPSPTDESQQYLEQNDSSFVLVPHEKQSSEISLKTAVEENETESKMMKEPHEELSSEMSLKTAAEEKETESKMIEEPHEELSREMSLKTAVEEKETESKMMEEPHDELNSEMSLSTAVEEKETGSKMTEESHEELSNEMSLEEKETGRKMTEEEELEAVMEMLCRTENKLLDVTQRLDRFKTPKGRKKLGNSSSPLLEEDSVVYVPIAEIKEKR

SEQ ID NO: 183 - DNA, 2151 bp, Eucalyptus grandis
atgcattccagaaagaatcttgcccaaaaagaagactttttgaaggcagaatctggatcggaggttcttgcctcgctgatattgagaaataggagaaggaaaaagcacaaacagaaactacaatcttctgtaaaagcaagaggctcaacccttgccaagaagagggccaataactccatcagaaagagactggtgcgtaggaacagctctgataaagacaaactcataaatttaaaagcttttcataataagaaaattgaaatagttcccgagaagctttcatcccctccatcttcagaaagagagctgcctattgcttctgacgaaaatgtgcaaaacaccgatgaggatgtcaaagttaacaagctgagaaggaagaggaagaagaaaatgagaaagcatttttcgaagttagatgaggcttcacgattgcagaggagaacaagataccttcttattaaaatgaagctggaacagaaccttattgatgcttactctggtgaaggctggaaaggccagagtcgggaaaagatcaagccaacaaaggaattacaaagggccaggaagcagatactgaattgcaaactcggaatacgtgatgctattcgacagctagactccattagttcagtgggcagcattgaagactctgtgattgctcctgatggttctgttcaccatgaacatatattctgtgcaaaatgcaagacaaatgaaacttcctcagataatgatatcatactctgcgatgggacatgcaattgtgcttttcatcaaaaatgtcttgatcctccactggaaactgaaagcattcccccaggagatcagggctggttttgcagactctgcgagtgtaagatggaaattatagagtcaacaaatgcacatctggggacccacttttctcttgacagcaactggcaggatatattcgaggaagaagctgcattgcctgatgggggaattcaggtgcttgacctagacgaaaagtggccttcagatgactctgaagatgatgactatgacccagaaaagatgacgaacaccggcatcaactgtgccggcaatgatgattctcaatcatacgacacaagtagctctaccagcctgagttggtcattagatggtgaaattttgtcaggaccaacaatatcaggcaaggaagggttgaactatcctgagagcattgcagggtctgatgtattaatggacacggatactgatactgtatgtggcccacgacagcgaaatgctgttgattataagcagctttataatgaaatgttcggtaaggatactcctgcctgtgaacaagccagtgaagatgaagactggggtcctaataaaagaagaagaagagaaagggaaacagatgcagccagcaccctcatgactctctgtgaaagtgagaaaaacaatccattcattgaccaagcctcagaaggtgataagaaactctctgcagaagcaagaatgagaaggcggattttcagaattcctccaactgcagttgagaagcttcgccaagtatttgcagagaatgaacttccctcaagatctgtcaaagaaaatcttgctaaagagtttggtcttgaacctgagaaggttagcaaatggttcaagaatgcacgatacatggcactcaaaacaagaaaggctgggggggctgatcaacctccaaaatccccgcaaaagcataaagaatctgaactagcaaaaatgatgaaaggggctgcgcctattttatctaaggatgcctcaacagacattgaattccattcctctctaaatactgagaaagtcatccagcaaaagagtacgaagccaatacacgggaagggttcacctatggtacctgaacatagctatatggagaattttgagttcgatgacaatatgtccttgaaacaaataaagctattgaaaggaaaaccaaaggacaggaagagggttgacttcgcagccagtgagggattacgagaaagagaagctcagttgcgggagctatgtaaaattagaagtaggctagatagtctgaggaagagaacccttacatttcagtcgagtgaatccaaggcttcagacgaattcaacacttgtagatcacgtgtagtatatgttccagtagcagaaataaaggagagagcttga

SEQ ID NO: 184 - protein, 716 aa, Eucalyptus grandis
MHSRKNLAQKEDFLKAESGSEVLASLILRNRRRKKHKQKLQSSVKARGSTLAKKRANNSIRKRLVRRNSSDKDKLINLKAFHNKKIEIVPEKLSSPPSSERELPIASDENVQNTDEDVKVNKLRRKRKKKMRKHFSKLDEASRLQRRTRYLLIKMKLEQNLIDAYSGEGWKGQSREKIKPTKELQRARKQILNCKLGIRDAIRQLDSISSVGSIEDSVIAPDGSVHHEHIFCAKCKTNETSSDNDIILCDGTCNCAFHQKCLDPPLETESIPPGDQGWFCRLCECKMEIIESTNAHLGTHFSLDSNWQDIFEEEAALPDGGIQVLDLDEKWPSDDSEDDDYDPEKMTNTGINCAGNDDSQSYDTSSSTSLSWSLDGEILSGPTISGKEGLNYPESIAGSDVLMDTDTDTVCGPRQRNAVDYKQLYNEMFGKDTPACEQASEDEDWGPNKRRRRERETDAASTLMTLCESEKNNPFIDQASEGDKKLSAEARMRRRIFRIPPTAVEKLRQVFAENELPSRSVKENLAKEFGLEPEKVSKWFKNARYMALKTRKAGGADQPPKSPQKHKESELAKMMKGAAPILSKDASTDIEFHSSLNTEKVIQQKSTKPIHGKGSPMVPEHSYMENFEFDDNMSLKQIKLLKGKPKDRKRVDFAASEGLREREAQLRELCKIRSRLDSLRKRTLTFQSSESKASDEFNTCRSRVVYVPVAEIKERA

SEQ ID NO: 185 - DNA, 2124 bp, Medicago truncatula
atgcgggatactgagaggttaaataaccaaggatctacaaaaccgagtaacacaaaggaacatatcaagttgaaggtagattccccacagttcaaaacaagtagcacaaaacaccaaaggaagaaacacagactgaaatcaaaatctcataaactcggaggttgcacaaatgcgtcagtgaggacagctactgattcttccaacaaggcgtcaaccaaggattcttcaaataaaacggataggaattcaacacaggttcagccttcaaaaaagatacaaggaggaaaaacttctcttaataatgataggaaaggtgagaaagatgttgttgatcaagagggaaatattcaaaaacgtaagagaaggagaaagaagaaaagacaaagacataatgtagatcttgatgatactgtacgcctccagagaagaacaaggaatatcttaatcagaatgaagcaagaacagaatcttatcgatgcttacgctggagaaggttggaaaggtcagagtcgagagaagattaggccagaaatggagctacaaagagcaaaaaagcagattttaaaatgcaagcttagtatccgtgatgccattcaccaactggattctcttagttcagttggtagtattgaaggttctgtcattgctacagatggatctgtttctcatgaacatatattctgtgcaaattgcaagataaacgaagtttctccagataatgatattatactctgtgatggcacatgcaatcgtgcgtttcaccagagatgtcttgatcctcctttggagactgaagacattcctcctgaagaccaaggctggttttgcaagtattgtgactgtaagatagaaatattggaggcaacaaacgcgcatcttgggactcgtttccccttagacagtacttggcaggatgtattcaaggaagaagctgctattcctgacggcgatgctgcattactaaatcaagaagaagaatggccgtcagatgatcctgaagacgatgactataatccagagaggaaagaagaaagccacggtggcttcaacacagaaggaaatgataaaaacgcatctgatgattcaagcagttcttccagcatgtggtctctaaatggagaatgctctctgttagatgaaggcatcaaccttgaatattattctaacgaccacatagattctgatgaatccggggaaatagcatgcggtcgtaggcagcgtagagctgttgactacaagaaactttatgatgaaatgtttggaaaggatgctccaccttgtgaacaagtgagtgaagatgaagattggggtcctcgaaaaagacggcgaagagaaaaggagtctgaggctgttaatactcttatgactctacatgagagtgaaaataaatatccgaataataagaacaatgatagaataagagggaattcttcaggcataaaaagaccttgttttaggttttcacatgaggcagttgagaagcttcgccaagtttttgcagagaacgagcttcctccaaaatccgtgaaggatgccctttcaaaagaattgggacttgatgctgcaaaggttaacaaatggttcaaaaatgcacgttacatggcacttaaaataagaaagcttcaagaaggaggacaacagcttcagagtatcacttctaagacctcaaaggattctacatcacaacatgtgcaggaagatgaggttttgaacccgaagtccgcgaaaattactgtgattagttccctgaagaagtgtgaaaatgttactggcaaagaaaaaacaaaagcatctagcaatcctttgaagaaaaagcgaccagaaatacctccatgcttgggagaaaatggcaacaaggattccatggaggtcagtgatgatgttagcttaatgaaactattacaagacaggaaaaagaaggtaagttttgcatttgaaggagactctgaggcagcagagttggaatttgaaagactcagcaaagtgaagacgaaaatagatagattgaagcaaagattaactggagttcaaaattgcagatcaaagggttcagatgaagttcatttgaatgagccatctattatgtatgttcctatagctgagttaagggaaaaggtgaaatag

SEQ ID NO: 186 - protein, 707 aa, Medicago truncatula
MRDTERLNNQGSTKPSNTKEHIKLKVDSPQFKTSSTKHQRKKHRLKSKSHKLGGCTNASVRTATDSSNKASTKDSSNKTDRNSTQVQPSKKIQGGKTSLNNDRKGEKDVVDQEGNIQKRKRRRKKKRQRHNVDLDDTVRLQRRTRNILIRMKQEQNLIDAYAGEGWKGQSREKIRPEMELQRAKKQILKCKLSIRDAIHQLDSLSSVGSIEGSVIATDGSVSHEHIFCANCKINEVSPDNDIILCDGTCNRAFHQRCLDPPLETEDIPPEDQGWFCKYCDCKIEILEATNAHLGTRFPLDSTWQDVFKEEAAIPDGDAALLNQEEEWPSDDPEDDDYNPERKEESHGGFNTEGNDKNASDDSSSSSSMWSLNGECSLLDEGINLEYYSNDHIDSDESGEIACGRRQRRAVDYKKLYDEMFGKDAPPCEQVSEDEDWGPRKRRRREKESEAVNTLMTLHESENKYPNNKNNDRIRGNSSGIKRPCFRFSHEAVEKLRQVFAENELPPKSVKDALSKELGLDAAKVNKWFKNARYMALKIRKLQEGGQQLQSITSKTSKDSTSQHVQEDEVLNPKSAKITVISSLKKCENVTGKEKTKASSNPLKKKRPEIPPCLGENGNKDSMEVSDDVSLMKLLQDRKKKVSFAFEGDSEAAELEFERLSKVKTKIDRLKQRLTGVQNCRSKGSDEVHLNEPSIMYVPIAELREKVK

SEQ ID NO: 187 - DNA, 2556 bp, Pinus radiata
atgccgaaagcaggaaaaggctcttccggttcactccgaaagaagcaagcgttgtcaaatacagcatcagagctaaggcctaaagctgcaattcagaagactaacaatgccgggagtatttctggcaggatgagggaaaggaaaccacggttacatgtacagatgattgcctcaattctcacgaaaaaaaggacaggtgaagcatctgaatcgagaaatgattctgagctagaagacaaacaatatctgagcaatagttcaaaaacaaatgccaattttgtagcggggaagttagttaaaaagactttgaaaaaagccccaagattaaacttgattaagaatgacagtcagaaaaaacccagtaagagttctgcttcgaggtcttatgctgcacagaaacctgaacggccacaacagagaaaaattaggaggacaaagtggaagggtgattctaaaaatataacaaaggtgaaaactgtgagaactagtaatatagatggcttgaagaggaagcagcaaaggagaaagaagaaaaagaaggcgcagaatgttccacaggatgaagtatcacgtgcaaagagaaggatcaaatatcttttgctcaaaatgaaacttgagcagaatcttattgatgcatattcaggggagggctggaaaggccagagtcgggagaaaataaagccagagaaggagttacagagagctgaaaagcagattctgcaatgcaaacttggaattcgtgaagcagtgcatcagcttgatcttctaagttcggaaggatctatagcagatgccgttattgatccagaagggcgtgtatttcatgagcatatattttgtgcaaaatgcaaaatgacagatgctcttccggataatgacataatattgtgtgatggagcttgcaatcgtggcttccatcagaaatgtctggatccacctttggctactgaaaacattcctcctggagatcagggttggctctgtaaagtttgcgaatgtaagctagagagtttggaagcaataaatgctcatttgggcacccagtttacagttgataatagctgggagggaatttttgctgatgcagctagaattgcgaatggtgaaagtacagctactgggaatggggaagaatggccatcagatgattcagaagatgatgactatgatccagagaaacaagagattagagatgaaacgggctatgagaataatatgagtgattctggaaagtcaagtggatggtcagaatcatataatgaaactgacaatgaatcagatgcttccttaacagataatctaaatgaatacatctctaagggaaagaagaggagcagagacactgatgaaaaaaacggacaagaagctataatagatttagatactgatgagaatgatggctcagacatgccagtttcagggagaaggcagcgaagagatgttgattataaaaagttgcatgatgaaatgtttggaaaagatggaccttgtgaagatgaagtcagtgaagatgaagactggggacccaataggaggcgtagaagagcgaaacagccggatacaaataccactaaggattcttcaaatgaagagaaagagcatgttagaaaggaagcagatgagaaagtagcagagcattcacaaagtagcataaaggataagaaacatattgtcagactgccagctaatgcagttgagaagctgcgcaaagtctttgctgaaaatgagctaccgtcaaggtcttacaaggaaaatctgtcacagcaactgggccttacatttcgaaaggtccatatgtggttcaaaaatgcccgttatatgtctctgaagagccgaaaggaaatgcctagaaatgagaactgcaatgaaactaatctcatgggagaaggtgatatggggccaaagaaaaaaataccaaaagagaagaaagcagaatcaacatgtcttttatcttctgttagagcagaatataaatctagaaatacaaaaaggaagcataggagaaaaaacatcaaagcacccttatctatctcttccagaagtgagagaaaaagaactatgtgcagactgcctgccaatgcagttgagaggtttcgccaagtctttgctgagaatgagttgccttcaatgtcctgtaaaatggcattatcaaagcagttggatctaccttatcggcaggtgcatatgtggttcaaaaatgctcgttatatgtctttgaagaagaaaaagatgaaccgtttaaaagaatcagctcccgttatttcctcacataccagaagacttgaagtagaaagtagcaaacccaatccacaaatcaaagagccagatgatgctggcaattcatacttaacagagatggaaaaattgggtaatattgagttgaaacttgaaaatatgagaaagattttagaaacagtctgtcctaaaagaggtactgatttttccaatgataagaatcaagaaggaatcgccaaccttcttagtgaggagcttcttgtgtatgtaccagtggtggagttgagggagaagagcttacaggttgctcctgtcaggtga

SEQ ID NO: 188 - protein, 851 aa, Pinus radiata
MPKAGKGSSGSLRKKQALSNTASELRPKAAIQKTNNAGSISGRMRERKPRLHVQMIASILTKKRTGEASESRNDSELEDKQYLSNSSKTNANFVAGKLVKKTLKKAPRLNLIKNDSQKKPSKSSASRSYAAQKPERPQQRKIRRTKWKGDSKNITKVKTVRTSNIDGLKRKQQRRKKKKKAQNVPQDEVSRAKRRIKYLLLKMKLEQNLIDAYSGEGWKGQSREKIKPEKELQRAEKQILQCKLGIREAVHQLDLLSSEGSIADAVIDPEGRVFHEHIFCAKCKMTDALPDNDIILCDGACNRGFHQKCLDPPLATENIPPGDQGWLCKVCECKLESLEAINAHLGTQFTVDNSWEGIFADAARIANGESTATGNGEEWPSDDSEDDDYDPEKQEIRDETGYENNMSDSGKSSGWSESYNETDNESDASLTDNLNEYISKGKKRSRDTDEKNGQEAIIDLDTDENDGSDMPVSGRRQRRDVDYKKLHDEMFGKDGPCEDEVSEDEDWGPNRRRRRAKQPDTNTTKDSSNEEKEHVRKEADEKVAEHSQSSIKDKKHIVRLPANAVEKLRKVFAENELPSRSYKENLSQQLGLTFRKVHMWFKNARYMSLKSRKEMPRNENCNETNLMGEGDMGPKKKIPKEKKAESTCLLSSVRAEYKSRNTKRKHRRKNIKAPLSISSRSERKRTMCRLPANAVERFRQVFAENELPSMSCKMALSKQLDLPYRQVHMWFKNARYMSLKKKKMNRLKESAPVISSHTRRLEVESSKPNPQIKEPDDAGNSYLTEMEKLGNIELKLENMRKILETVCPKRGTDFSNDKNQEGIANLLSEELLVYVPVVELREKSLQVAPVR

SEQ ID NO: 189 - DNA, 2178 bp, Populus tremuloides
atgggtgattctggaaagacgtcaaagctgcaagactcgcacaaatgttcaccttctgacacagtgactgggtcgttgctgattaaatcattgaagataaagaaggacagcaaaatatctcctagaaaaggccaaaaaacgaaaacaaaatcaaaaccaaaaccaatacctcatctaaaaactatcatcagttcagctgtatcaaaaagaaaagtttctcctaagggcattgggaatggctctaccagtagaaaactgattcataggaaaattctgcataaagcacttgataagaaggcctcaaggaagggggcttcctcagggctacaattgtcaactattgattctaagggaaatggaaaaaatggtgatgaaggtgcaattaaaaaactcaagaagaggaagcctaagaaaaggcaaagggacaaggtaaagctagatgaaccatcacgattgcagaggagagcaaggtacctgatgattaaaatgaagctggaccagaaccttatagatgcttactctggagaaggctggaaaggtcaaagtcgagagaagatcaggccagaaaaggaactactgcgagcaaggaagcagattttgaagtgtaaacttggtttacgtgatataattcggcaggtggattctcttagtacagtaggatgtattgaagagacagttatggctccagatggatctgtttcacatgaacatatattctgtgcgaagtgcaaattgaatgaagtttccccagataatgatattgtactctgtgatggtacatgcaactgtgctttccaccaaaaatgccttgaacctcccttggatactgaaagtatacctccaggagatcagggatggttttgcaagttctgtgaatgcaggatggatattatagaagctatgaatgctcatttgggaacccatttctcagaggacagcagttggcaggatattttcacagaagaagcagcaattcctgatgctggaaatgtgctattaaaccccgaagaagaatggccttcagatgattctgaagatgataattacgatccagagaggagagacaacatcatgagtgaagcgggtactgatgatgatgcatctgatgacatcagcagttcaaccagcttgggttggtcttcagatggtgaggtttttttgggatccaggaggtgggagatgcatggcttggacttcagaaacaattctatttatagcagtttagattctgatgaaaccagtgatggggaaattgtttgtggccgtaggcagagaagagcaattgactataagaagttatatgatgaggtgtttggaaaggatgctcctgcacacgagcaagccagtgaagacgaagattggggtcctggcaaaagaaagcgacgggagaaggagtcaaatgcagccagcacccttatgacactgtgtgaaagtaaaaaaaaaagtaaaagtgatgagaccattgaaggtatgatgaaccttccccctcaaactcgaaggccaattttcagactcccccctgatgcagttgagaaacttcgccaagtatttgtagaaaatgaacttccatctagaactgtcaaggagaatctgtcaaaagaattgggccttgaacctgggaaggttagcaaatggttcaagaattcccgttatttagctctgaagtcccggaaggtagagaaaggagaacaacttcataactctagttccaaagtctctgctgaacccacattaaatgtcatggagggcaaaactgctgatctttcacaggattcttgggaagaaactgaggtatgtatcccaaagaatttgaaaaggatccttcagaggaagaagctgaagtcaataagcagaagtttaaggaaaaatgaacagaaaagaggttcctacgaatcacctactaaaagcaatgagatgaatgctgagtgcagtgatgatgtgagcttgaagaagttgttaaaagcaaaaccaaagggagtaaagaaaaaggttaatcctatttcagtagcggctgaatatgatatggagagactctgtagagcgaaggctatattagagaagatgaagcagaaagtggtgaagctacaaaatggcaaagctaggaagtcatccaaaacccgtccacttgaagaatttatcgtttacattcccattgctgagttgaggggaaaaaattga

SEQ ID NO: 190 - protein, 725 aa, Populus tremuloides
MGDSGKTSKLQDSHKCSPSDTVTGSLLIKSLKIKKDSKISPRKGQKTKTKSKPKPIPHLKTIISSAVSKRKVSPKGIGNGSTSRKLIHRKILHKALDKKASRKGASSGLQLSTIDSKGNGKNGDEGAIKKLKKRKPKKRQRDKVKLDEPSRLQRRARYLMIKMKLDQNLIDAYSGEGWKGQSREKIRPEKELLRARKQILKCKLGLRDIIRQVDSLSTVGCIEETVMAPDGSVSHEHIFCAKCKLNEVSPDNDIVLCDGTCNCAFHQKCLEPPLDTESIPPGDQGWFCKFCECRMDIIEAMNAHLGTHFSEDSSWQDIFTEEAAIPDAGNVLLNPEEEWPSDDSEDDNYDPERRDNIMSEAGTDDDASDDISSSTSLGWSSDGEVFLGSRRWEMHGLDFRNNSIYSSLDSDETSDGEIVCGRRQRRAIDYKKLYDEVFGKDAPAHEQASEDEDWGPGKRKRREKESNAASTLMTLCESKKKSKSDETIEGMMNLPPQTRRPIFRLPPDAVEKLRQVFVENELPSRTVKENLSKELGLEPGKVSKWFKNSRYLALKSRKVEKGEQLHNSSSKVSAEPTLNVMEGKTADLSQDSWEETEVCIPKNLKRILQRKKLKSISRSLRKNEQKRGSYESPTKSNEMNAECSDDVSLKKLLKAKPKGVKKKVNPISVAAEYDMERLCRAKAILEKMKQKVVKLQNGKARKSSKTRPLEEFIVYIPIAELRGKN

SEQ ID NO: 191 - DNA, 2256 bp, Saccharum officinarum
atgcattcttcggaaaataaactggtatgctccaactcgggaagatcatcaaaagggaatgagacctctatggagttggttcctgtaccaaaaagaccaactagacatgatgcttcccgccaatgcaaatctgattctcctttgaagcgatcaccaaggaaagctagaaatgctactctggcaaaaagcataaagaataaatatcattgtagtcccctcaaacagcggagggcttcagattctgtttctggaaaagttgcgacaggactaactgtgaggaggaggaagaaaagaaaaatgcaaaatactgatgaggcaactcgcttggaacgaagagcgagatattttctaatcaagataaaattggagcagaatttgctagatgcttactctggagatggatggaatgggcaaagccgggaaaaaataaagccagataaggatctgcggcgtgccaggaaacaaatcataaaatgcaaaattgctatacgtgatatcattcgccaacttggtttgtatacttctactgggagtcttaatgacccagcaatgcctccagatcagtctaccaatccggaacataccatgtgctcaacatgcaagtctcatgaatcatttcccagcaataaatttatcttctgtgaagggccctgcaaaagggcatatcatgagaaatgtttggaacctcccttaaacaaaagcgtacttccaacaagtagccatggatggctttgcaaattctgtttgtgcaaagtgaaaattttagaaactattaatgcacatctaggaacaagttttacagtgaagtgccccttcgaagatatattcaaggaagcaacggaacaaatagactccgaggatgcactagatgaagattggctttctgagtattcaggtgatgaggactatgatcctgatgaaaatgaggacagcggcaactgtatggacagcggggaggaaattatgtctgatgattccgatggttcaggaagccccctttattctccaaatgacgatattcctgacttcatatcagcagacttaaatgacgtggaagggttttgtcacaccaatttagacttaggcattgatgccgttgaagatgatttggcacagatccttacctaccaaaggccaagaagagatgttgattatagaaggcttaatgaggaaatgtttggaaaaataataggaaatgaaggacagagtgaggatgaagattggggccatgaaaggagaaagaaaaggacttgttcaggtggtgctggggataattctgtgggtttctcaaatgttatatctgaggaaaagagccaaaagaaggggagaaaacttttcaggattcctcctgcagctgtcgaggtacttcgcaaagcttttgctgaaaatgagcttccaccccgggatgtcaaagaaaatctctcaagagaattgggaatttcttttgaaaagattgataaatggttcaaaaatacacggtgtgctgctctcagagatcgcaaggctgaagggaacagtcataatacggctcccagcaaaagctcaagaaataaaggaaaagctggaatctcaagccaggctgaaaggaatggtcatgttactggtccctgcaataactcgagaacaaatgaagaaaaatcgttgacactagctcctaatgcccagggagagaagaatgggattgcagcagattatgtcttacaaaaatctggtatatcggggaaggttgattcagtagacaactcttgcttggttcccttgtctgaaagcatcaatgtgcatacacgattgcaacagaatcttgagatgaggaagatggaatcaactagcagtcctgtgtggctgcacaataaaggaggttgcttgtttccaacaggccaagccaaggagagtacattacctacaggcaagccttgtttgcagtcagaaataacccattcaacaattaatgaagtgagcactttagtgcaagctacttcttggatggatgctgggtcgtgcgctgaggtgcaagaagccactccttgggtggacatcggggcctcagattaccagcctttcctggacgtgatcgatgagatgtgcggacttgagtgcaggctgcagagactgaaggagaacatgctctcatctggcatagacggcaaaaccacaggtgagagtgacatgggaaaccaggctgtggtgctcgtgccgaccgccgagctcaaggaaaaagcgccgcatggcagtttttttgggcattattgcccatag

SEQ ID NO: 192 - protein, 751 aa, Saccharum officinarum
MHSSENKLVCSNSGRSSKGNETSMELVPVPKRPTRHDASRQCKSDSPLKRSPRKARNATLAKSIKNKYHCSPLKQRRASDSVSGKVATGLTVRRRKKRKMQNTDEATRLERRARYFLIKIKLEQNLLDAYSGDGWNGQSREKIKPDKDLRRARKQIIKCKIAIRDIIRQLGLYTSTGSLNDPAMPPDQSTNPEHTMCSTCKSHESFPSNKFIFCEGPCKRAYHEKCLEPPLNKSVLPTSSHGWLCKFCLCKVKILETINAHLGTSFTVKCPFEDIFKEATEQIDSEDALDEDWLSEYSGDEDYDPDENEDSGNCMDSGEEIMSDDSDGSGSPLYSPNDDIPDFISADLNDVEGFCHTNLDLGIDAVEDDLAQILTYQRPRRDVDYRRLNEEMFGKIIGNEGQSEDEDWGHERRKKRTCSGGAGDNSVGFSNVISEEKSQKKGRKLFRIPPAAVEVLRKAFAENELPPRDVKENLSRELGISFEKIDKWFKNTRCAALRDRKAEGNSHNTAPSKSSRNKGKAGISSQAERNGHVTGPCNNSRTNEEKSLTLAPNAQGEKNGIAADYVLQKSGISGKVDSVDNSCLVPLSESINVHTRLQQNLEMRKMESTSSPVWLHNKGGCLFPTGQAKESTLPTGKPCLQSEITHSTINEVSTLVQATSWMDAGSCAEVQEATPWVDIGASDYQPFLDVIDEMCGLECRLQRLKENMLSSGIDGKTTGESDMGNQAVVLVPTAELKEKAPHGSFFGHYCP

SEQ ID NO: 193 - DNA, 2181 bp, Vitis vinifera
atgcgtggaactggaaagaaagcaggacatcaggaatctggaaagtcttgctttcctaaaagaaatatcgggcctaagctgaatgcagcattgcagattaaaaatggtagtaaaatatctcagaccaggaaatgcaagccaaaatcaaaatctcatgcaaagacaattggtgcaatcctgtctaagagaacaactactgactctccaagcaagggaagcaggagtggatccacaaccagaaaactgattcacaagaaaaccctgcataaagccattgatactgagtcttccaagaaggagtcttcatcaaagcttaaaggtgagaagcccccacaaattagcacaaacaaaaatggggaaactgtggacaagaatgttaaacctcaaaaattaaagaaaagaggaaagcggaagcggcgaaaggataattcagagctagatgaagcttctcgcttgcaaagaagaaccaggtacctcttgatcaaaatgaaactggagcagaatcttattgatgcttactctggggaaggttggaaaggtcatagtcgagaaaagatcaggccagagaaggaactacaaagagctacgaagcaaatattgaaatgtaaacttgggatccgtgatgcaattcgccagctggagtcactgagctccataggatgtattgaagatactgcaattgcttcagatggatctgtttatcatgaacacataatctgtgcaaagtgcaagttgcgggaggctttcccagataatgatattatactctgtgatgggacgtgcaattgtgctttccaccagaaatgtcttgatcctccattggaaactgaaaatattcctccgggagaccaaggttggttttgcaagttctgcgagtgtaagatggaaatactagaagcaatgaatgcacatcttggaacccgcttctctgtggacagtacttggcaggatattttcaaagaagaagctgctttgcctgatggtgggagtgcactgccctatccagaggaagattggccttctgatgattcacaagatcatgattatgatcctgaaagaaatgaaaatagctgcagcatcagcactgctggcactgaaggaaatgcttcagatgatacaaatagttctttaagcttgagttggtcgtttgaagacgaaatcctttctggatccaaaagatcagggattatcagtgcagattctgatgaaacatctgattgtgaaatcataagtggtcgtaggcaacgaagagctgttgattatagaaagttatatgatgaaatgtttggaaaggatgctcatgcaaatgaacaagttagtgaagatgaagactggggtcctgctaacaaaaggcggagagaaaaggagtctgatgcagccagcaccctcataactctatatgaaggtgagaaaaagttacctaatgtggaaaccatggaagccaaacaaaaaatttcttcagatccacaaactaaaaggccattttccagaattccacttgatgcggttgagaagcttcgccaagcatttggggagaatgaacttccctctagagatgtgagggagaatcttgcaaagcagttgggtcttgattatgagaaggtgaacaaatggttcaaaaatgcacgatatatagcgctaaaaacaagaaaggcagaaagagcaaaacaacttcagacttctcccagaatctccaaggaatccagatcagaaatcgtgaaggacaaaactgttgatctagtggcatcaagggataactcatcagcatcactggtccgtgcactaaagaatttgaaaaaggtgcggaggagaaaaaatccaaagccaataatgaccagccctgtaaagaaaaagcatcatagaagggctttacttgagtcacctacaaatgacaaggttactatggagtttgacgatgatgtgagcttgaagaaacaactgaagcttttgaaagaaaaaagtaagagggacaagcaaagggtcgacttcaaggagggaactggtgtacaagatgcagagaaggagatggagagactctgccaaattaaggataagatagagaagttgaagcaggtaatactgagacttcaatgtgacaaaactaatcaatggcaagaccagtcagtgatctatgttcctgtggcagagctaagggagaaaggtcgattttgcatcacatct

SEQ ID NO: 194 - protein, 727 aa, Vitis vinifera
MRGTGKKAGHQESGKSCFPKRNIGPKLNAALQIKNGSKISQTRKCKPKSKSHAKTIGAILSKRTTTDSPSKGSRSGSTTRKLIHKKTLHKAIDTESSKKESSSKLKGEKPPQISTNKNGETVDKNVKPQKLKKRGKRKRRKDNSELDEASRLQRRTRYLLIKMKLEQNLIDAYSGEGWKGHSREKIRPEKELQRATKQILKCKLGIRDAIRQLESLSSIGCIEDTAIASDGSVYHEHIICAKCKLREAFPDNDIILCDGTCNCAFHQKCLDPPLETENIPPGDQGWFCKFCECKMEILEAMNAHLGTRFSVDSTWQDIFKEEAALPDGGSALPYPEEDWPSDDSQDHDYDPERNENSCSISTAGTEGNASDDTNSSLSLSWSFEDEILSGSKRSGIISADSDETSDCEIISGRRQRRAVDYRKLYDEMFGKDAHANEQVSEDEDWGPANKRRREKESDAASTLITLYEGEKKLPNVETMEAKQKISSDPQTKRPFSRIPLDAVEKLRQAFGENELPSRDVRENLAKQLGLDYEKVNKWFKNARYIALKTRKAERAKQLQTSPRISKESRSEIVKDKTVDLVASRDNSSASLVRALKNLKKVRRRKNPKPIMTSPVKKKHHRRALLESPTNDKVTMEFDDDVSLKKQLKLLKEKSKRDKQRVDFKEGTGVQDAEKEMERLCQIKDKIEKLKQVILRLQCDKTNQWQDQSVIYVPVAELREKGRFCITS

SEQ ID NO: 195 - DNA, 2166 bp, Zea mays
atgcattcttcggaaaataaactgggttggaatgagacctctatggggttggttcctgtaccaaaaagaccagctagacctgatgcttcccaccaatgcaaatctgattcctttatgaagcgatcaccaaggaaagttagaaatgctactctggcaaaaagcataaagagcaaataccactatagtcccctcaaacagcggaagggttcagattctgttcctgggaaaatcgtaacaggactaaccgcaaggaaaaagaagaaaaggaaaatccaaattacagacgaggcaactcgtttggaacgaagagcgagatattttctaatcaagataaaactggagcagaatttgctagatgcttactctggagatggatggaatgggcaaagccgagagaaaataaagccagagaaggaactgcaacgtgccaggaaacaaatcataaaatgcaaaattgctatacgtgatatcatccgccaacttgatttgtatacttctactgggagtgttgatgacccactaatgcctacagatcagtccaccaatcccgaacataccatgtgctcaacatgcaagtctcatgaatcatttcccagcaataaaattatcttctgcaaagggccctgcaaaagggcatgtcatgagaaatgtttggaacctcccttaaacaaaagcgtacttccaacaagtagccatgggtggctttgcaaattctgtttgtgcaaggtgaggattttagaaactattaatgcacatctagggacgagttttacagtgaagtgccactttgaagatatattcaaggaaactactgaactaatagactctgaggatgcactagatgaagattggctttctgagtattcaggtgatgaggactatgatcctgatgaaaatgaggccagtggcgactgtatggacagcggggagaagattatgtctgatgattccaatggttcaggaagccccctttattctccaaatgacgatattcctgacttcatatcagcagacttaaatgttgtggaagggttttgtcataccaatttagatttaggcattgatgccgttgaagatgattttgcacagatcctcacctaccaaaggccaagaagagatgttgattatagaaggcttaacgaggaaatgtttgggaaaataaccgggaatgaagaacagagcgaggacgaagattggggccatgaaaggagaaagaaaaggacgcattcaggtgttgctggggataattctgttggtttcttgaacgttatatctgatgaaaagagccagaagaaggggagaaaacttttcaggattcctcctgcagctgttgaggtacttcgcagagcttttgctgaaaatgagcttccaccccgggatgttaaagaaaatctctcaagagaattgggaatttcttttgaaaagattgataaatggttcaaaaatacacggtgtgctgctctcagagatcggaaggctgaaggaaacagtcataatacagctcccagcaaaagctcaaaaaataaaggaaaagctggaatctcaggcaagactggaaggaatggtcatgttactggtccctgcaataatttgagaacaaatgaagaaaaaacaggtatatcggggaagtttgattcaggagacaactcttgtttggttcccttctctgaagtcatcaatgtgcctacgcgattgccacacaactttgagatgaggaagatggaatcaactagaagtcctgcgaggctacacaataaaggagggttcctgtctgcaacagtccaaattaaggagagtacgttgttacccacaggcaagccttgttggcagtcagaaatgagccatccaacaactaatgaagtgagcacttcagcgcaagctactacttggatcgacgcgggggcgtgtgccgaggagcaagaacctactccttgggtggacatcggggtctcagactaccagcctttcctggatgtgatcgacgacatgtgcggacttgagtggaggctgcagagactgaaggagaacatgctctcatctagcatagacggccaaaccgccgccagtgagagtgacaaaagaaaccagaccgtggtgctagtgccaaccgccgagctcaaggaaaagctgccgcatgacggtttattcgggcattattgcccatag

SEQ ID NO: 196 - protein, 721 aa, Zea mays
MHSSENKLGWNETSMGLVPVPKRPARPDASHQCKSDSFMKRSPRKVRNATLAKSIKSKYHYSPLKQRKGSDSVPGKIVTGLTARKKKKRKIQITDEATRLERRARYFLIKIKLEQNLLDAYSGDGWNGQSREKIKPEKELQRARKQIIKCKIAIRDIIRQLDLYTSTGSVDDPLMPTDQSTNPEHTMCSTCKSHESFPSNKIIFCKGPCKRACHEKCLEPPLNKSVLPTSSHGWLCKFCLCKVRILETINAHLGTSFTVKCHFEDIFKETTELIDSEDALDEDWLSEYSGDEDYDPDENEASGDCMDSGEKIMSDDSNGSGSPLYSPNDDIPDFISADLNVVEGFCHTNLDLGIDAVEDDFAQILTYQRPRRDVDYRRLNEEMFGKITGNEEQSEDEDWGHERRKKRTHSGVAGDNSVGFLNVISDEKSQKKGRKLFRIPPAAVEVLRRAFAENELPPRDVKENLSRELGISFEKIDKWFKNTRCAALRDRKAEGNSHNTAPSKSSKNKGKAGISGKTGRNGHVTGPCNNLRTNEEKTGISGKFDSGDNSCLVPFSEVINVPTRLPHNFEMRKMESTRSPARLHNKGGFLSATVQIKESTLLPTGKPCWQSEMSHPTTNEVSTSAQATTWIDAGACAEEQEPTPWVDIGVSDYQPFLDVIDDMCGLEWRLQRLKENMLSSSIDGQTAASESDKRNQTVVLVPTAELKEKLPHDGLFGHYCP

SEQ ID NO: 197 - DNA, 2172 bp, Arabidopsis thaliana
atgtataaagcagtaagtaagcgggtaactagaagtagtggatctggtttgaagcagacaaatgtagataatggaggagagattagtccaactgttgacagagtatctgaacaaggcaaatcatcagaggcagggagtcacatgccaactgatgcaaacggaaatggacatttgcatcatgagattatggatcatggaaaggggaatgaagaacagaaaccaacccctcaaaccgtgaagaaggattctaataccaataccaaattttcagggtctcatcgtgagcttgtcatcggtcttccttgccgtggacaatttgaaatccacaaccggtccagggcatctacgagttcgaagaggttaggaggaggtggagaaaggaatgtgttgtttgcaagtcacaagagagctcagagatctaaggaagatgctggaccatcttcggttgttgctaattccacacctgtaggtcgaccaaagaaaaagaataagactatgaacaaaggacaagttagagaagatgatgagtacacaagaatcaaaaagaaacttcgatactttctaaaccggattaactatgagcaaagcctaattgacgcctattcgttagaaggctggaaaggttcaagcctggaaaagataaggccagagaaagagcttgaacgagccacaaaggaaattttgcggcgcaagcttaaaattagagatctttttcagcaccttgacacactctgtgctgaaggaagccttccagagtctttatttgatactgatggagagatttctagcgaggatatcttctgtgcaaaatgtggttcaaaggacttgtctgttgataatgatatcatactatgcgatgggttttgcgatcgaggctttcaccaatactgtcttgaaccacctctgcggaaagaagatattcctccggatgatgagggttggctatgccccggatgtgattgcaaagatgacagcttggacttgcttaatgattctttagggacaaaattttcggtcagcgacagttgggagaaaatatttcctgaggcagcagcagcgctggttggtggaggtcaaaatcttgactgtgatcttccttcagatgattctgatgatgaagagtatgatccagattgtttgaatgataatgaaaatgatgaagatggcagtgatgacaatgaagaatctgagaacgaagatggtagttctgatgaaactgaattcacatctgcatctgacgaaatgattgagtcatttaaagaagggaaagatataatgaaagatgtaatggcccttccatctgatgattctgaggatgatgactatgatcctgatgccccgacttgtgatgatgataaagaaagttcaaattctgattgtacatcagacactgaagatcttgaaacttccttcaaaggagatgagactaatcagcaagctgaagatacaccacttgaggatcctggcagacagacgtctcagctccaaggtgatgcaattttagagtcagatgttgggcttgatgatggtcctgccggtgtatccagaaggaggaatgttgaaaggctggattacaaaaagttgtatgatgaggaatatgacaatgttccgacttcgtcaagtgatgatgacgattgggataaaactgcaagaatgggaaaagaagattccgagtcggaagatgaaggggacactgtacctctgaaacagtcttcaaatgcagaagatcatacttctaagaaacttatacggaagtcgaaaagggcagataaaaaggataccttagaaatgccacaagaaggtcctggagaaaatggtggttctggtgaaattgaaaaaagcagctcttcagcatgtaaacagacagatcccaaaactcagagactgtacatatcttttcaagagaatcaatatccagacaaagccacgaaggagagcttagccaaagagctacaaatgacagttaagcaagttaataactggtttaagcataggcgttggtcgataaacagcaaacctttagtttcagaggaaaatgtcgagaagttaaaaacaggcaaggaaggtgaatgtgagacatctgttgctggaagtagcaaacaaactatggaaaccgagtcagttgcagagaaaccaaccaatactggatcacggaaaagaagaagaaagtag

SEQ ID NO: 198 - protein, 723 aa, Arabidopsis thaliana
MYKAVSKRVTRSSGSGLKQTNVDNGGEISPTVDRVSEQGKSSEAGSHMPTDANGNGHLHHEIMDHGKGNEEQKPTPQTVKKDSNTNTKFSGSHRELVIGLPCRGQFEIHNRSRASTSSKRLGGGGERNVLFASHKRAQRSKEDAGPSSVVANSTPVGRPKKKNKTMNKGQVREDDEYTRIKKKLRYFLNRINYEQSLIDAYSLEGWKGSSLEKIRPEKELERATKEILRRKLKIRDLFQHLDTLCAEGSLPESLFDTDGEISSEDIFCAKCGSKDLSVDNDIILCDGFCDRGFHQYCLEPPLRKEDIPPDDEGWLCPGCDCKDDSLDLLNDSLGTKFSVSDSWEKIFPEAAAALVGGGQNLDCDLPSDDSDDEEYDPDCLNDNENDEDGSDDNEESENEDGSSDETEFTSASDEMIESFKEGKDIMKDVMALPSDDSEDDDYDPDAPTCDDDKESSNSDCTSDTEDLETSFKGDETNQQAEDTPLEDPGRQTSQLQGDAILESDVGLDDGPAGVSRRRNVERLDYKKLYDEEYDNVPTSSSDDDDWDKTARMGKEDSESEDEGDTVPLKQSSNAEDHTSKKLIRKSKRADKKDTLEMPQEGPGENGGSGEIEKSSSSACKQTDPKTQRLYISFQENQYPDKATKESLAKELQMTVKQVNNWFKHRRWSINSKPLVSEENVEKLKTGKEGECETSVAGSSKQTMETESVAEKPTNTGSRKRRRK

SEQ ID NO: 199 - DNA, 2901 bp, Lotus japonicus
atgattagttcaactggagaattgacaagccataacaacagtagcattgagcacatggaaactgagcaacctgaattgtctgaaaaaacacctcagataggctctgaatgtctggacggtgaacaaagggtgcttggtactgtgtcaaccagttctgttaataatgaaaattcaaatcaagtttctgccaatgtgaccgagaattctgtttttcaactaccagcaacacctcaacattgcttagaaaagagtggtcagactgtaacaagtccacccctggaagaaagcaccttgaaacaagttgctactaatgtatctaatggtaaatcagaaaacaaatgtcagacatcctctcaagatgttcaaaacgaacttgtggaagcaagtgatgtaataactggctcttttgttgcggaccaaacacaatccattcctgctcaagtgaatacgagttctgtgaatgaactattggatattccttccggagatgttgcagtagaagttggttctgatagtttagaaaaaaagtctaaagggtgcttggtagacagcgaacaaagggtacttggtactgtgttaaccaattctattaatgatggaaattcaaatcaagtttctgccaatgtgaccgagaattctgttattcaactgccagcaccacctcaacattgctttgaaaagagtggacagactgtaaaaagttcatctctggaagaaagtaccttaaaacaagtctccactaatttatctaacagtaaatcagaaaacatatgtcagacatcctctcaagatgttcaaaacgaacttgtggaaacaagtgatgcagtaactggctctgttgttgcagacaaaacacaatccattcctgctcaagtgaatacaagttctgtgaatgaactattggatattccttccagagatgttgcagaagaagttggttctgatagttcagaaaggaagtctaaaagcacaactccttcacaattgagacatataggtaaaagtaactcaaagttatcgaaaaagaagtatatcctaaggtcgttaggaagcagtgacagagctttgcggtccaggacaaaagaaaaacctaaagcgcctgaaccaagtagtaactcagttgacgttaataatgatggagtgaagaaggaaaaaaggaggaagaagaaaaaaacaggaggggaggaaaagaaggatcaattttataaaatcaaagctcacctaagatatttattaaacagagtaagctatgagcaaaacttaattgatgcttactctggtgacggctggaaaggatacagtatggacaagttaaagcctgataaggagattcaacgggctaaatctgaaattcttcgacgtaaattgaaaattagggatctatttcaaaacttggattccttgtgtgctgaaggaaagtttccagaatctttgtttgattctgagggagagattgacagtgaggatatattctgttcaatttgccagaccaaagagttgagcactgataatgatataattctctgtgatggtgcttgtgaccgtggatttcaccagcactgcttggatcctccattgttaactgaagacattccacctggcgatgagggttggttatgccccggatgtgattgcaaagatgactgcgttgaccttcttaacgactccttaggaacacgtctctctcttagtgacacctgggagaaggtttttcctgaagcagcagctgttactggaaataatatggatcagggacttccttctgatgattctgatgatgatgattataaccctaatggtaaagaggatgtggaggttgaaggaggtgaatcaagttctgatgaatctgaatatgcttctgcttctgagaaattggaagattcacaccatgaggatccatacttaggccttccttctgaagattcagaggacaatgattatgatcctagtgctccagatcttgacaataaagtcacagaagaaagttcaagctctgatttcacatctgactctgaggatcttgctgctgctattgaggataacacgtcccctggacatgttaaacagactaaaagcagacaaaaaagtaaagttggtaagaacccatcaatggttgatgaagtgtcatctttacgagagccagaacttgaggaagagggtttcactccagtttctgggaaaagaaatgtggaaaggctggactacaaaaagctgtatgatgagacatacaaaagtgatactagtgaagatgaagaatggactgccagtgccactccaagtagaaaaaagaaactctgtggcaaaatgactccagtgtcatcagatggaaaggcctcaaataattctagacatactcctgaaaggaacacccaacaagataaagttgaaaatacaaataattcacccactaaatcacttgaaggctgtctggaatctggctcaagggataaaaagcctaggtcttcaacacgtcaaagacttggagacgttgtagtgcagagacttcacaaatcttttaaagacaatcagtatccggatcgagccacaaaagaaagcttggcagaagaactggggctcacttttttccaggttgacaaatggtttggcaatgctcgatggggctttcggcgttcatcgcgtatgggagctagtccaggcgaatatgcttcgccacaggccactggcagcggacctgaaaatactggggagagggaacgcgaattagcttcccaggaagtcggtgaagaaaaattgaaaacccccagtcctagaaaaaggaagcatttgtctgaaccgcaggcatctgaagcaccgcagattattgttcttggcttagcagcatctcctggctcaccacgggctcatgcaggcaataaaaagaagacagtgaaaaggaaatga

SEQ ID NO: 200 - protein, 966 aa, Lotus japonicus
MISSTGELTSHNNSSIEHMETEQPELSEKTPQIGSECLDGEQRVLGTVSTSSVNNENSNQVSANVTENSVFQLPATPQHCLEKSGQTVTSPPLEESTLKQVATNVSNGKSENKCQTSSQDVQNELVEASDVITGSFVADQTQSIPAQVNTSSVNELLDIPSGDVAVEVGSDSLEKKSKGCLVDSEQRVLGTVLTNSINDGNSNQVSANVTENSVIQLPAPPQHCFEKSGQTVKSSSLEESTLKQVSTNLSNSKSENICQTSSQDVQNELVETSDAVTGSVVADKTQSIPAQVNTSSVNELLDIPSRDVAEEVGSDSSERKSKSTTPSQLRHIGKSNSKLSKKKYILRSLGSSDRALRSRTKEKPKAPEPSSNSVDVNNDGVKKEKRRKKKKTGGEEKKDQFYKIKAHLRYLLNRVSYEQNLIDAYSGDGWKGYSMDKLKPDKEIQRAKSEILRRKLKIRDLFQNLDSLCAEGKFPESLFDSEGEIDSEDIFCSICQTKELSTDNDIILCDGACDRGFHQHCLDPPLLTEDIPPGDEGWLCPGCDCKDDCVDLLNDSLGTRLSLSDTWEKVFPEAAAVTGNNMDQGLPSDDSDDDDYNPNGKEDVEVEGGESSSDESEYASASEKLEDSHHEDPYLGLPSEDSEDNDYDPSAPDLDNKVTEESSSSDFTSDSEDLAAAIEDNTSPGHVKQTKSRQKSKVGKNPSMVDEVSSLREPELEEEGFTPVSGKRNVERLDYKKLYDETYKSDTSEDEEWTASATPSRKKKLCGKMTPVSSDGKASNNSRHTPERNTQQDKVENTNNSPTKSLEGCLESGSRDKKPRSSTRQRLGDVVVQRLHKSFKDNQYPDRATKESLAEELGLTFFQVDKWFGNARWGFRRSSRMGASPGEYASPQATGSGPENTGERERELASQEVGEEKLKTPSPRKRKHLSEPQASEAPQIIVLGLAASPGSPRAHAGNKKKTVKRK

SEQ ID NO: 201 - DNA, 2379 bp, Oryza sativa
atggataagacaactacttctgatcttgttttggacaacgacaacattgggagtaatgctggttctgcacaggagcctcttactaccaatggtaagactagtggggtcagaaatagatacaaacaaactgttaaaaggggaaggaaaggctcccaaatatcaccaagtaaaacatatcccctgagatcttcacatagtaatgtcagggtgcttcgctctgcctcaaaaaagaagaatgagacacctattgtgcccacaaatgataatactgctgttcaacgagttgcgaagaaaaggaaaagaagcaaacccttgagacctgcacctagcagggtgcttcgctctacctcggaaaagaagaataaggcacataatgagcttctaaatgatggtgctggtgttcaaccagccgaaaagaaaagaaaggtaggcagacccccaaaaggaggaactcccaaggacgattacctcatgatccgaaagcgagttagatatgttttgaatcgaatgaactatgaacaaagtttaattcaagcctatgccagtgaaggttggaaaggtcaaagcttggaaaaaataagacctgagaaggagcttgaacgagccaaggtggaaattctgcgatgcaagtcaagaatacgggaagcttttcggaatttggattccctcctatctgagggaaagctggatgaatctatgtttgattctgctggagaaatatctagtgaagatattttctgtgctgcatgtggttcaaaggatgttacattaaaaaatgacataattctttgtgatggaatctgcgacagagggttccaccagtattgtttaaaccctcctttgcttgctgaagatattccacagggggatgaaggatggctttgccctgcatgtgattgcaaaattgactgcatagatgtattaaatgaactccaaggggtcaaactctctatccatgactcttgggagaaagtttttcctgaggcagcatcctttttgaatggttctaagcaaattgatgcgtccgatcttccatcagatgattcagcagacaatgattatgaccctactttggctcaagggcacaaggtggatgaagaaaaatcttctggagaagatggtggtgaaggattagattctgatgactcatcttctgaggattctgaatcttctgagaaggaaaagtctaaaacttcacagaatggaaggacagttgatgatcttggtttgccttctgaggattcagaggatggtgactttgatccagcaggtccagattccgacaaagaacaaaatgatgaatcaaactcagatcagtcagatgaatcagattttacatctgactctgatgatttttgtgctgagattgctaaatcctgtggtcaggatgaaatctcaggcccttcatcatcacaaatcagaacagtcgatcgcaccgatggaagtggttttgatggtgagcctaatgcagaaaattcgaatcttgcatttatggagacagagctagagcaagacatggtgctaccaatttctagtaaacgacaagttgaacgtttggattacaaaaaactgtataatgaggcttatggtaaagcatcatctgattcaagtgacgatgaagagtggtatggaaatagtacacccgaaaaaggtaatttagaagacagtgaaacagattcgcttgctgaatcacctcagggtggaaaaggattctctagaagagcaccagttaggtaccataataatgaacatactccacagaatgtaaggcccggtggttcagtaagcgaccagcaaactgaagtactttgctccaatagcaatggtagcacagccaaaaacagacattttggtcctgcaattaatcagaaactgaaggcacatttcaaggaagatccataccctagtcgtgcaacaaaagaaaatctggcacaagagttaggcctcacatttaatcaggtcactaaatggttttccagtactcgtcattacgcaagagtggcagccacaaaaaaggagaacaacattgaaaatcatacggctgagaataataacaataccaacactgttgatagcatacaactgagaggatccaatgatattgttagtgtagatagaaatgatatggtctccgaggaaaggacaggacaaagtaatctcaatgaaggtactccattaagatcagataccagctgtgggcagagtgtggctgtgactcctatggtacacccagaaaaccagggcaatgattcctcaagtaatgttagaacaccaaatgctaagtctgcggagaaattgatccctggactggaaaattcagatgaggctaggcgaaaggcggtacaacgggaactgagaaagatgaagactggcaggtga

SEQ ID NO: 202 - protein, 792 aa, Oryza sativa
MDKTTTSDLVLDNDNIGSNAGSAQEPLTTNGKTSGVRNRYKQTVKRGRKGSQISPSKTYPLRSSHSNVRVLRSASKKKNETPIVPTNDNTAVQRVAKKRKRSKPLRPAPSRVLRSTSEKKNKAHNELLNDGAGVQPAEKKRKVGRPPKGGTPKDDYLMIRKRVRYVLNRMNYEQSLIQAYASEGWKGQSLEKIRPEKELERAKVEILRCKSRIREAFRNLDSLLSEGKLDESMFDSAGEISSEDIFCAACGSKDVTLKNDIILCDGICDRGFHQYCLNPPLLAEDIPQGDEGWLCPACDCKIDCIDVLNELQGVKLSIHDSWEKVFPEAASFLNGSKQIDASDLPSDDSADNDYDPTLAQGHKVDEEKSSGEDGGEGLDSDDSSSEDSESSEKEKSKTSQNGRTVDDLGLPSEDSEDGDFDPAGPDSDKEQNDESNSDQSDESDFTSDSDDFCAEIAKSCGQDEISGPSSSQIRTVDRTDGSGFDGEPNAENSNLAFMETELEQDMVLPISSKRQVERLDYKKLYNEAYGKASSDSSDDEEWYGNSTPEKGNLEDSETDSLAESPQGGKGFSRRAPVRYHNNEHTPQNVRPGGSVSDQQTEVLCSNSNGSTAKNRHFGPAINQKLKAHFKEDPYPSRATKENLAQELGLTFNQVTKWFSSTRHYARVAATKKENNIENHTAENNNNTNTVDSIQLRGSNDIVSVDRNDMVSEERTGQSNLNEGTPLRSDTSCGQSVAVTPMVHPENQGNDSSSNVRTPNAKSAEKLIPGLENSDEARRKAVQRELRKMKTGR

SEQ ID NO: 203 - DNA, 3267 bp, Petroselinum crispum
atggaagagatctcagaccctaaaccaaatgcattagagcaagtacttcctactgtcccaaatggtaaatgtactgcaccggtgcaaatggaaagtttggctgttgatgttcaaaaagtatcaggtgaagcaaaggtgaggatatgttcctgttggtgcgagatagtacgttctccagaagatttaactaaacttgtgccttgtaatgattttgcagaagatataaaattgtttgattctgatcccatgcaacaagaagctgaaagctccattggaataccattgatccctaaacaagttacaatgtcccataaccatgaccatgaatctggttctgaaatggtcagtaacgaagtaatgcaagaaaaccatgtaattgccacagaaaatacttaccagaaatctgattttgaccgtataaatatgggacaaaaagaaaccatgccagaagaagtgatccataagtctttcttggaatcctcaacttcctcgatagatatactattaaataatcataacagttatcaatcaggactgccaccagagaatgcagtaacagattgcaagcaagtccaattgggacaccgaagtgatgatgctataaagaattctggtcttgtggaattggtaataggtcagaaaaatgttgccaagagtcctagccagttggtagaaacggggaaaagaggtcgtggtcggcccaggaaagtacaaactggccttgagcaattggtaataggtcagaaaactgctgccaagagctctagccagttaggtgacacagggaaaagatctcgtggtcggcccagaaaagtacaaaattctccaacttctttcttggagaatataaatatggaacaaaaagaaacaataccagaacaagtgacccaaaattctatcttggagtccttgactatcccgacagacaatcagtcaagaacttataacagtgatcaatcagaactgccaccagagaatgcagcaaaaaattgcaatcacgcccaatttggacatcaaagtgatgatactacaaagatttctggattcaaggaattggtaataggtcaggaaacagttgcaaagagtcctagccagttggtagacgcaggaaaaagaggtcgtggtcggcccagaaaagtacaaactggtcttgagcaattggtaccagttcaggaaactgcggccaagagctctagccagttgggagacacagggaaaagatctcgcggccggcccaggaaagtacaagattctccaacttctttagggggtaatgttaaagtggtaccagagaaaggaaaagattctcaggaattgtcggtaaacagcagcagatcattgcgctcaaggtcacaagagaaatctatcgaacccgatgtcaataatattgtggcagatgaaggtgctgacagagaaaaaccaaggaagaagaggaaaaagcgaatggaggaaaatagggttgatgaattctgtagaataaggacacacctaaggtacttactacacagaataaaatacgagaagaatttccttgatgcttactctggggagggatggaagggacaaagcctagacaaaataaaacctgagaaggagcttaaacgagcaaaagctgaaatttttggacgcaaattgaaaattagagatctatttcagcgcttagatttagcacgttccgagggaaggcttccagaaattctatttgattctcgaggagaaattgacagcgaggatatattctgcgcgaaatgtggatccaaggatgtgacactcagtaatgatatcatcctttgcgatggtgcatgtgatcgtggatttcaccaattttgtttggacccaccattgctgaaagaatatattcctcctgacgacgagggttggctttgcccgggatgcgagtgcaaaattgactgcatcaagttacttaatgattcccaagagacaaatattttactcggtgacagctgggagaaagtttttgctgaggaggcagcagcagcagcttccggaaaaaatctagatgataattctggactgccttcagatgattccgaggatgatgattatgatcctgggggccctgatttggatgagaaggtgcagggagatgattcgagtacggatgaatctgattatcagtcggaatcagatgatatgcaagttatacgtcaaaaaaattcgcgcgggcttccttcagatgattccgaagatgatgaatacgatcctagtggcttagttactgatcagatgtataaggacagctcatgttctgattttacatctgattctgaggattttacaggtgtgtttgacgattataaggatactggtaaagctcaagggccactggcatcgaccccagatcacgtcaggaacaatgaggaagggtgtgggcatcctgagcaaggtgatactgcccccctgtatccgagaagacaagtagagagtttggactacaaaaagctaaatgatattgagttctctaaaatgtgtgacatccttgatattctttcaagtcaacttgatgtaattatttgtactggtaaccaggaagagtatgggaacacatcttctgattcaagtgatgaagattatatggttacttcttcaccagataaaaataattctgataaagaagctacagcaatggagcgtggaagagagagcggtgatttggagctagaccaaaaagcgagagaatccactcataataggagatatataaagaagtttgctgttgaaggcacagattcttttctttctagatcgtgtgaagactctgcagcacctgttgctggtagtaaaagtacttcaaaaacattgcacggggaacatgcaactcagagactcctccaatccttcaaggaaaatcaataccctcaacgagctgtgaaagagagtttggctgcagaattagcactttcagtccgacaggttagcaactggtttaataatagacgttggagctttcgccactcatcacgtattggatcggatgtagctaaatttgattcaaacgatactccccgtcagaaaagcattgacatgtctggacccagcttgaaatcggtcttggacagtgctacttacagtgaaattgaaaagaaggaacaagatacggcaagccttggtttgacagaaggttgtgacagatacatgacgctgaatatggttgcagatgaaggcaatgtgcacactccttgtattgcagaaactagggaagaaaaaaccgaagtcggtataaagccacaacagaacccactataa

SEQ ID NO: 204 - protein, 1088 aa, Petroselinum crispum
MEEISDPKPNALEQVLPTVPNGKCTAPVQMESLAVDVQKVSGEAKVRICSCWCEIVRSPEDLTKLVPCNDFAEDIKLFDSDPMQQEAESSIGIPLIPKQVTMSHNHDHESGSEMVSNEVMQENHVIATENTYQKSDFDRINMGQKETMPEEVIHKSFLESSTSSIDILLNNHNSYQSGLPPENAVTDCKQVQLGHRSDDAIKNSGLVELVIGQKNVAKSPSQLVETGKRGRGRPRKVQTGLEQLVIGQKTAAKSSSQLGDTGKRSRGRPRKVQNSPTSFLENINMEQKETIPEQVTQNSILESLTIPTDNQSRTYNSDQSELPPENAAKNCNHAQFGHQSDDTTKISGFKELVIGQETVAKSPSQLVDAGKRGRGRPRKVQTGLEQLVPVQETAAKSSSQLGDTGKRSRGRPRKVQDSPTSLGGNVKVVPEKGKDSQELSVNSSRSLRSRSQEKSIEPDVNNIVADEGADREKPRKKRKKRMEENRVDEFCRIRTHLRYLLHRIKYEKNFLDAYSGEGWKGQSLDKIKPEKELKRAKAEIFGRKLKIRDLFQRLDLARSEGRLPEILFDSRGEIDSEDIFCAKCGSKDVTLSNDIILCDGACDRGFHQFCLDPPLLKEYIPPDDEGWLCPGCECKIDCIKLLNDSQETNILLGDSWEKVFAEEAAAAASGKNLDDNSGLPSDDSEDDDYDPGGPDLDEKVQGDDSSTDESDYQSESDDMQVIRQKNSRGLPSDDSEDDEYDPSGLVTDQMYKDSSCSDFTSDSEDFTGVFDDYKDTGKAQGPLASTPDHVRNNEEGCGHPEQGDTAPLYPRRQVESLDYKKLNDIEFSKMCDILDILSSQLDVIICTGNQEEYGNTSSDSSDEDYMVTSSPDKNNSDKEATAMERGRESGDLELDQKARESTHNRRYIKKFAVEGTDSFLSRSCEDSAAPVAGSKSTSKTLHGEHATQRLLQSFKENQYPQRAVKESLAAELALSVRQVSNWFNNRRWSFRHSSRIGSDVAKFDSNDTPRQKSIDMSGPSLKSVLDSATYSEIEKKEQDTASLGLTEGCDRYMTLNMVADEGNVHTPCIAETREEKTEVGIKPQQNPL

SEQ ID NO: 205 - DNA, 2160 bp, Zea mays
atggaaaaaaatatagctcactgtcctgttgagggcaatggtgagattgaaaatggtgcgagctctagtcagaatcctgagtctcttgagcattcagttttgctgtctacatctcaaacgatgccaaataacttggggataaggaaaaactataaaagggcagcaaacagaggtaaaaaaggttcccaaggactaacaggccaagcatatactttgatgtcatctaatagtgatgtcagggtgcttcgctccacatcaagttcaaagacaacatctactgagcatgttcaggctccagtacaaccggctgccaagagaagaaaaatgagcagagcctcaaacaaaagttcgactgatgagttttcacaaattcgtaaacgagttagatatattttgaaccgaatgaattatgagcaaagcctaattgaagcttatgctagcgaaggctggaaaaatcaaagtttggataagataagacctgagaaggagcttgaacgagccaaatcagaaatcttacgatgcaaattgagaatacgagaagtcttccggaatattgattctcttctctccaaggggaaaattgacgaaactttatttgattctgaaggagaaatatcttgcgaagatatcttttgttccacttgtggttcgaatgacgctacattgggtaatgatatcattctctgcgatggagcttgtgacagagggttccaccagaactgtttaaatcctcccctgcgtactgaagatatccccatgggagatgaaggatggctctgcccagcatgtgattgcaagatagattgtatagatctaataaatgaactccatgggagtaacatctccattgaggactcttgggagaaagtttttccagatgcagctgctatggcaaatgactctaaacaagatgacgcatttgatcttccatcagatgactcagacgacaatgactttgaccccaatatgcctgaagagcatgtggttggtaaggatgaagaatcgtctgaagaggatgaggatggaggatcagactctgatgactcagactttttgacatgttctgatgattcggaacctttgatagacaagaaggttgatgacctcagattaccttctgaagattcagaggatgatgactatgatccagcaggtcctgattcagataaagatgtcgaaaagaagtcaagttctgatgaatctgacttcacatctgactcagatgatttttgtaaggagatttcaaaatctggacatgatgaagtttcatcacctctattacccgatgccaaggtgggtgatatggaaaagattactgctcaagctaaaacaacaagttctgctgacgaccctatggagactgaaatagaccagggtgtggttttaccagattcaaggagacggcaagctgaacggttggactacaaaaagttgtatgatgaggcatatggtgaagcatcatctgattctagtgatgatgaagaatggtctgggaagaacacgccaataataaaaagcaatgaagagggtgaagccaattctcctgcgggaaaaggctccagagttgtgcaccataatgatgaactgactacacaaagcactaaaaaaagcttgcattctattcatggttcagtagatgagaaacctggagaccttacttctaatggcagcaacagcacagccaggaaaggacattttggcccagtaattaatcagaagctacatgaacattttaagacacaaccataccctagtcgttctgttaaagaaagtctggcagaagaactagggttaacatttcgtcaggttaacaaatggtttgaaactaggcgtcattccgcaagggtagcttcttccaggaaaggcatcagtctagataagcatagcccccaaaatactaatagtcaagtgacagctagtatggaacctaaagaacctgaggggactgtggtggaagaatctaatgtatgcctaaatgggggtactaccatctctaaagaagcagtgtcttcaaaagttggatcaagaacccctggaagtgatgtgggagggtcaaaagttgattctgctgaggatcagaatccggggcctgatcttgcagagaaggcaaggcaaaaggcaatacagcaggagttgaggaagaaaaaaatgggacgatga

SEQ ID NO: 206 - protein, 719 aa, Zea mays
MEKNIAHCPVEGNGEIENGASSSQNPESLEHSVLLSTSQTMPNNLGIRKNYKRAANRGKKGSQGLTGQAYTLMSSNSDVRVLRSTSSSKTTSTEHVQAPVQPAAKRRKMSRASNKSSTDEFSQIRKRVRYILNRMNYEQSLIEAYASEGWKNQSLDKIRPEKELERAKSEILRCKLRIREVFRNIDSLLSKGKIDETLFDSEGEISCEDIFCSTCGSNDATLGNDIILCDGACDRGFHQNCLNPPLRTEDIPMGDEGWLCPACDCKIDCIDLINELHGSNISIEDSWEKVFPDAAAMANDSKQDDAFDLPSDDSDDNDFDPNMPEEHVVGKDEESSEEDEDGGSDSDDSDFLTCSDDSEPLIDKKVDDLRLPSEDSEDDDYDPAGPDSDKDVEKKSSSDESDFTSDSDDFCKEISKSGHDEVSSPLLPDAKVGDMEKITAQAKTTSSADDPMETEIDQGVVLPDSRRRQAERLDYKKLYDEAYGEASSDSSDDEEWSGKNTPIIKSNEEGEANSPAGKGSRVVHHNDELTTQSTKKSLHSIHGSVDEKPGDLTSNGSNSTARKGHFGPVINQKLHEHFKTQPYPSRSVKESLAEELGLTFRQVNKWFETRRHSARVASSRKGISLDKHSPQNTNSQVTASMEPKEPEGTVVEESNVCLNGGTTISKEAVSSKVGSRTPGSDVGGSKVDSAEDQNPGPDLAEKARQKAIQQELRKKKMGR

SEQ ID NO: 207 - DNA, 2079 bp, Zea mays
atggaaaaaaagacagttcacgttctggctgagggtaatggtgagattgaaaatggtacgagctctagtcagaatcctgagacccttgagcatccagttttgctgtctgcatctcaaactgtgccaaataacttggggataaggaaaaactataaaagggcagcaaacagaggtaaaaagggttcccaaggactaacaggtcaggcatatacattgaggtcatctgatattgatgtcagggtgcttcgctctacatcaggttcaaagacaacatctactgagcatgtgcagcctccaggacaaccagctgccaagagaagaaaaaggagcagagcctcaaacaaaaattcgacagatgagttctcacaaattcgtaaacgggttagatacattttgaaccgaatgaattatgagcaaagcctaattgaagcttatgctagtgaaggctggaaaaatcaaagtttggataagataagacctgagaaggagcttgaacgagccaaatcagaaatcttacgatgcaaattgagaatacgggaagtcttccaaaatattgattctcttctgtccaaagggaaaattgacgaatctttatttgattctgaaggagaaatatcttgtgaagatatcttttgtgctacttgtggttcgaaaaatgctacattgggtaatgatatcattctctgtgatggagcttgtgacagagggttccaccagaactgtctaaatcctcctctgcgtactgaagatattcccatgggagatgaaggatggctctgcccagcatgtgattgcaagttagactgtatagatctaataaatgaactccagggcagtgacatctccattgaggacccttgggagaaagtttttccagaggcagctgctatgaccaatggctctaagcaagatgaacgatttgatcttccatctgatgattcggatgacaatgattttgaccccaatatgcctgaagagcatgtggctagtaaggaagaaggatcttctgaagaggaagaggatgatgacggaggatcagactctgacgactctgacttcttaacctgttctgatgatttggaacctttgatagataaaaagaaggttgatgacctgggattatcttctgaagattcagaggatgatgactatgatccagcaggtcctgattcggataaagatgtcgaaaagaagtcaaattctgatgagtctgatttcacgtctgactcggatgatttttgtaaggagattaaaaaatctggtggacatgatgaagtttcatcgcctccattacccgatgtcaaggtgggtgatatggaaaagaacactgctcagtctaacacaacaagttctgctgacgaccctatggagactgaaatagaccagagtgtggttttaccagtatcaaggagacgtcaagctgaacggttggactacaaaaggctgtatgatgaggcatatggtgaagcatcatctgattctagtgatgaagaagaatggtctgggaagaacacaccaataaaaagcaatgaagagggtgaagttggttctcctgcaggaaaaggctctagagttgcgcaccataatgaactgactacacaaaacactaaagaaagcttgcattctcttcatggttcagtagatgagaaacatggagatcttacttctaatggcagcaatatcaaagataggaaaggacattttggtccagtgattagtcagaagctacatgaacattttaagacacaaccataccctagtcgttctcttaaagaaagcttggcagaagaactagggctaacatttcatcaggtcaacagatggtttgaaaataggcgtcattttgcaaggttagcttcttccaggaaaggcatcagtccagataagcatagcccccaaaatactaatagcccagtgacacctagtatgcaacctaaagaaccagaggggactgtgatggaagaatctaatgtatgcataaacagggatgctaccatctctaaaaaagcggtttcttcaaaagtcggatcaagaaagaaccttagcaagagttcccctaaaagccgggtcaaaagttga

SEQ ID NO: 208 - protein, 692 aa, Zea mays
MEKKTVHVLAEGNGEIENGTSSSQNPETLEHPVLLSASQTVPNNLGIRKNYKRAANRGKKGSQGLTGQAYTLRSSDIDVRVLRSTSGSKTTSTEHVQPPGQPAAKRRKRSRASNKNSTDEFSQIRKRVRYILNRMNYEQSLIEAYASEGWKNQSLDKIRPEKELERAKSEILRCKLRIREVFQNIDSLLSKGKIDESLFDSEGEISCEDIFCATCGSKNATLGNDIILCDGACDRGFHQNCLNPPLRTEDIPMGDEGWLCPACDCKLDCIDLINELQGSDISIEDPWEKVFPEAAAMTNGSKQDERFDLPSDDSDDNDFDPNMPEEHVASKEEGSSEEEEDDDGGSDSDDSDFLTCSDDLEPLIDKKKVDDLGLSSEDSEDDDYDPAGPDSDKDVEKKSNSDESDFTSDSDDFCKEIKKSGGHDEVSSPPLPDVKVGDMEKNTAQSNTTSSADDPMETEIDQSVVLPVSRRRQAERLDYKRLYDEAYGEASSDSSDEEEWSGKNTPIKSNEEGEVGSPAGKGSRVAHHNELTTQNTKESLHSLHGSVDEKHGDLTSNGSNIKDRKGHFGPVISQKLHEHFKTQPYPSRSLKESLAEELGLTFHQVNRWFENRRHFARLASSRKGISPDKHSPQNTNSPVTPSMQPKEPEGTVMEESNVCINRDATISKKAVSSKVGSRKNLSKSSPKSRVKS

SEQ ID NO: 209 - DNA, 4731 bp, Zea mays
atgggaaggaaagggtcagaagtatcaccaagcaaaaggtatcccttgaggtctgcacacagtagtggtagagttcttcgctctgccttagccaataataataaggacagtgagcctctgaatgcggctgctgctacccaagcagctgtgaaaaaaagaagtggcaaccagctagatagtcctaatagcactgtcaggctacttcgttctacgtcaaaaaataaggacgaggcacatagcgggcctcttaatgacaggatcattgataagccagctgcaaataaaagaaaacatgccaatccctcacaggttggaagtcccagcagcagtgtcagggtgcttcgctctgcaataaaaaataaagatatggcgcgcagtgagcctcaaagtgacaggaccgctggtgaggcagctacaaataaaagaaaaaacgccaattcctcaaaggtggggagtctgagctctggtctcagtgtgcttcggtctgcttcaaaagctaaggatgagacatgtatcaaacctttaaatgatagtcctgctgttgaaccagcttcaagtaaaagaaaatgcaccagtccgtcaaaggtgggaagtcccagcaacagtgtcagggtgcttcgatctacttcaaaatataagaatgagacatgtaccgagcctttaaatgatagtggtgctgttgaaccagctgcaaatagaaggaaaggtgtcagtcgttcaaaggagggaagtcccaatagcagtgtcagggtgcttcgctctgcctcaaataataagattgatgtatctattgagccactgaataatagtactactggtcaaccggctgcgaaaagaagaaaaaatggcagttcctttaagagcagtgccagggtgctttgctctacctcagaaaggaaaaatgaggcatctagtgagcctttaaatgatagtactgctgctcagccagctgcgaggaaaaagaaaggtggtgcaatgccaaagactgataacccaaagattggtgtcagggttcttcgctctgcctcaggaaagaagaatgagacatgtactgagcctgtaaatcggagtacttctcgtgaaccaactgtgacaaaaaaaagaaattgcaagccttcaaaggatcgcggtcccaagaaggactacttaaaaatttgtcaaagaattaaatatattttgaatcgaatgaagtatgaacaagcctttattcaggcttatgcaagtgaaggttggaaaggccaaagtttggaaaaaataagacccgagaaggagcttgaacgagccaaggcagaaatccttcaatgcaagttaagaatccgggaagcttttcgaaatatggactctcttttatcgaaggggaagcttgaagaatctttgtttgattcagcaggacaaatttcaagcgaagatatattttgtgccatatgtggctcaaaggatgttacttcacaaaatgacatcattctttgtgatggagcctgtgacagaggattccaccagaattgtttgagccctcctttgctaactgaagaaattcctccgggggatgaaggatggctttgccctgcatgtgtgtgcaaagcagactatatagatgcgttaaatgaacttcaaggaagcaaactctccattcatgactcatgggtgaaagttttccctgaggcagcttcaactgccaatggttctaaacaagttgatgcttctgatctgctgccagatcatataaaggacagtgctaaccttgcattggttggaacacacatggtgaatgaaatcaggttttctgaagaggatgatagcaaagcggatgacctcggcttgccttcggaggactcaggggatggtgacttcgatccagcaggtccagattctagtgaagaccaaaatgatggattgaactcagaagagtcagatttcacatctgactctgattatttttgtgctgagattgctaaatcttgcggccaggatgaagtctcggcatctccattatcaaatgtgataaaccgtactgatagaatgaaactcagggcctacagtagacgctctaatgaagaaaaccacaatcatgcatttatggacatggagctagagcaagacatagtgctaccagttccaagcaggcggcaggttgaacggttggattacaaaaaactatacgatgaggcatatgaggaagaatcatctaattcaagtgatgaagaagagtggtctggaaaagaactcttagaaggcagtggaacagattcacttgatgagccttcgtcctgtaaaaggctctctagaagagcaccagcagggcagcagaataatgaacttacaccacagagccggcctcatggttctaacagtgagcagaaaactgaagttcttcgctccaatggcagtagtagcacaggacggaagtatgatcctgaagttacccagaaattgaaggtgcattttgagaaagatccatatcctagccgtgaaacaaaagaaaatctatcagaagaactaggcttgacatttaatcaggtctccaaatggttctctagtactcgtcactattcaagggttgcttctgccaaaaaagaaatgcatcctgacagccatacttgtgagaataatgatgagacaactgtagacagcatgcaagcaaaacaacccaatgctggggtgatggaaaagttgacgggggatagaaatggcattgttcctgagaaaccgatggtgcaggacaatcttaaccaaggagcgatggaaaagttaactagggataaaaatgacattgttcctgagaaaccggtgatgcagagcagtcttaaccaatgtaataatgaagatataccgctttctggaacagaaattgagatggagtcttacgaacaagaatcatctgactcaagtgatgaagagtggtccatacttagcacaccacgaaaaacaagattacaagaccatggaaaatcatcagttactgaatcacttcgttctgcaaaacggtgttccagaagagcaccagctagggagcagaataatgaacgtattcagagtgagcagcttcatggttctgcaagtgagcagcaaactgaatttcttcgctccaatgtcagcagtggcaaggtctcaaaatatcattttggccctatagttagtcagaagcttaaggaacattttgaaaaagatccatatccttgccgtgcaacaaaagagagtctggcacaagagctaggactgacatttaatcagatcagtaagtggttctctggcactcgtcattattcaagagatgctgttgccaagaatcagaaacgcccgggagaaaatactactgtgaataataatagcacaacctttgatgacatacaagtaatagaacccaatgttgggttgatagataaaccagctgcagatgtaaatgacatgatttctgaaaagttgatggtccaaataaatcttaacgaaggcattgaagaagatatcccaccgagccaatatgccaggtgtgaagagaaaataactatgactccagctgccatctcaagggaagctggtcttccaggatatggtcctggtcctggagaaaactttcttcaggtcagttcaaggaatactagctgtgagcagagtgtgatactggctcctaccgctatcgcaagagaagttggtccaccaggatatgcgactggagaaaaccagggcaatggggctccatggaatacaagttatgagcgaagactatttatgaatcctgtgaccagctcaagagcagtcagtcctccaggatatgggcctgaagaaagccgaggcagtggcatttcctggaatacaagcagtgaacaaatattgtttatgagtcctacaaccatctcaagagaacttggtccaccaggatatgggcctagagaagaccagtgcagtggcacttcatggaatgcaagctgcgagttgggagtatttatgagtcctgtgaccacctcaagagaagacagtccgccaggatatgggcctcgagaaaaccaggagaatgacaatatgagatgcgagttgagaatgtttacaagtcctacaaccatctccagagaagttggcccaccaggatatgagcttactggaaaaaacaagggcaacggcgcttcatgtactacgaattaccagcagggagcgtttacgagtcctgaagccttcccaagagaagcctgtcctccaggatttgtgtctggagagaaccagggtaacgacactccatggtatatgagcagcaaacagatggcgtttacgagtcctacgaccaaccctagagtaggtccgccagggtatggacaggaaaaccagggcagtcgtgtttcttggaatacgagttatgagcagggagtgtttatgagttctacaaacatctcaagagaagccggtccgccaggttatgggcctggggaaagtcagggcaatatcacttcatggatttcgacaggcgggcagagaatgtttacaggtccttcaactatcccgaacgaagtcgggcagcaaggatatggcccttcaggaatcccgggaacggatggctcaaggagtatggacttgaaagcctttccaccaggatatggacctgctggagaaaaccagggcggtggtgcttcagggagcgtcataagcccccatgctcggtctgcagagaacgtagagttttcagacgacgctagaaaaaaggctatacagcgggagctgagacggcggcagaagttcaggtga

SEQ ID NO: 210 - protein, 1576 aa, Zea mays
MGRKGSEVSPSKRYPLRSAHSSGRVLRSALANNNKDSEPLNAAAATQAAVKKRSGNQLDSPNSTVRLLRSTSKNKDEAHSGPLNDRIIDKPAANKRKHANPSQVGSPSSSVRVLRSAIKNKDMARSEPQSDRTAGEAATNKRKNANSSKVGSLSSGLSVLRSASKAKDETCIKPLNDSPAVEPASSKRKCTSPSKVGSPSNSVRVLRSTSKYKNETCTEPLNDSGAVEPAANRRKGVSRSKEGSPNSSVRVLRSASNNKIDVSIEPLNNSTTGQPAAKRRKNGSSFKSSARVLCSTSERKNEASSEPLNDSTAAQPAARKKKGGAMPKTDNPKIGVRVLRSASGKKNETCTEPVNRSTSREPTVTKKRNCKPSKDRGPKKDYLKICQRIKYILNRMKYEQAFIQAYASEGWKGQSLEKIRPEKELERAKAEILQCKLRIREAFRNMDSLLSKGKLEESLFDSAGQISSEDIFCAICGSKDVTSQNDIILCDGACDRGFHQNCLSPPLLTEEIPPGDEGWLCPACVCKADYIDALNELQGSKLSIHDSWVKVFPEAASTANGSKQVDASDLLPDHIKDSANLALVGTHMVNEIRFSEEDDSKADDLGLPSEDSGDGDFDPAGPDSSEDQNDGLNSEESDFTSDSDYFCAEIAKSCGQDEVSASPLSNVINRTDRMKLRAYSRRSNEENHNHAFMDMELEQDIVLPVPSRRQVERLDYKKLYDEAYEEESSNSSDEEEWSGKELLEGSGTDSLDEPSSCKRLSRRAPAGQQNNELTPQSRPHGSNSEQKTEVLRSNGSSSTGRKYDPEVTQKLKVHFEKDPYPSRETKENLSEELGLTFNQVSKWFSSTRHYSRVASAKKEMHPDSHTCENNDETTVDSMQAKQPNAGVMEKLTGDRNGIVPEKPMVQDNLNQGAMEKLTRDKNDIVPEKPVMQSSLNQCNNEDIPLSGTEIEMESYEQESSDSSDEEWSILSTPRKTRLQDHGKSSVTESLRSAKRCSRRAPAREQNNERIQSEQLHGSASEQQTEFLRSNVSSGKVSKYHFGPIVSQKLKEHFEKDPYPCRATKESLAQELGLTFNQISKWFSGTRHYSRDAVAKNQKRPGENTTVNNNSTTFDDIQVIEPNVGLIDKPAADVNDMISEKLMVQINLNEGIEEDIPPSQYARCEEKITMTPAAISREAGLPGYGPGPGENFLQVSSRNTSCEQSVILAPTAIAREVGPPGYATGENQGNGAPWNTSYERRLFMNPVTSSRAVSPPGYGPEESRGSGISWNTSSEQILFMSPTTISRELGPPGYGPREDQCSGTSWNASCELGVFMSPVTTSREDSPPGYGPRENQENDNMRCELRMFTSPTTISREVGPPGYELTGKNKGNGASCTTNYQQGAFTSPEAFPREACPPGFVSGENQGNDTPWYMSSKQMAFTSPTTNPRVGPPGYGQENQGSRVSWNTSYEQGVFMSSTNISREAGPPGYGPGESQGNITSWISTGGQRMFTGPSTIPNEVGQQGYGPSGIPGTDGSRSMDLKAFPPGYGPAGENQGGGASGSVISPHARSAENVEFSDDARKKAIQRELRRRQKFR

SEQ ID NO: 211 - DNA, 4620 bp, Zea mays
atgggaaggaaaggctcagaaatgtcaccaagtaaaaggtatcccttgaggtctccacatagtagtggtagagttcttcgctctgccttagccaatgataataaggacagtgagcctctgaatgctgctgctgctacccaagccgctgtgaaaaaaagaagtggcagtcagttggatagtcctaatagcagtgtcaggttgcttcactctacatcaaaaaataagaacgaggtatgtagcgggcctctaaatgacaggatccctgataagccagctgcaaataaaagaaaacgtgccagtccttcacaggtgggaagttccagcaacagtgtcagggtcgttcgctctgcaataaaaaataaagatgaggcatgcagtaaatctctaagtgacaggaccgctggtgagccagctgcaaataaaagaaaaaacgtcaatcgctcaaagacggggagtctgagctgtggtgtcagggtgcttctatctgcttcaaaagctaaggatgagacatctaccaagcctttaaatgatagtgctactgttgaaccagcttcaggtaaaaggaaaggcaccagtccgtcaaaggtgggaagtgccagcaatagtgtcagggtgcttcgatctacttcaaaatataagaatgagacatgtactgagcctttaaatgatagtggtgctgttgaaccagctgcaaataaaaggaaaggtgtcagtcgttcaaaggagagaagtctcaatagcagtgtcagggtcgttgctctggcctcaaataataagattgaggtatctattaagcctctaggtaatagtactgctggggaaccagctgcgaaaagaagaaaaagcggcagttccttcgaggcaggaagccctgtgagcagtgccagggtgcttcgccctacctcagaaaggaagaatgaggcatctaagcctttaaatgaaagtactgctgctcaaccagctgcgaggaaaaaaaaagctggggtaatttcaaagaccgacaatccaaagattggtctcagggttcttcgctctgcctcaggaaagaagaatgaagcatgtattgggcatgtaaatgatagtacttctgctgaaccaactgtgacaaaaagaaaccgcaagccttcaatggatcgcagtcccaagaaggactacttaaaaatttgtcaaagagttagatatattttgaatcgaatgaactatcaacaaacctttattcaagcttatgcaagtgaaggttggaaaggccaaagtttggaaaaaataagacctgaaaaggagcttgaacgagccaaggcagaaatcctccaatgcaagttaagaatccgtgaagcttttcgaaatatggactctcttttatccaaggggaagcttgaagaatctttgtttgattccgcaggagaaatttcaagcgaagatatattttgtgctgtatgtggctcaaaggatgttactttacaaaatgacatcattctttgtgatggagcctgtgacagaggattccaccagaactgtttgaaccctcctttgctaactgaagatatacctccgggggatcaaagatggctttgccctgcatgtgtctgcaaagcagactctatagatgcactaaatgaacttcaagggagcaagctctccattcatgactcatgggagaaagttttccctgaggcagcttcaattgccaacggttctaaacaagttgatacttctgatctgctgccagatcatataaagcacagtgacaaccctgcattggttgaagggctgatggtggatgaagtcaggctttctgcagaggatgacagcaaagcggatgaccttcgcttgtcttcggaggactcaggggatggtgacttcgatccgtcaggtccagattctagtgaagaccaaaaagatggattgaactcagaagagtcagatttcacatcagactctgatgatttttgtgctgagattgccaaatcttgtggccaggatgaagtctcggcatctccattatcaaatgtgataaaccatacttatagaatgaaactcagggccagcaacaaccgctctaatgaagaaaaccatgatcatgtatttatggacatggagctagggcaagacatggtgctaccagtttcaagcaggcggcaggtggaacggttggattacaaaaaactatatgatgaggcatatgggaaagaatcatctaattcaagtgatgacaaagagtggtctggaaaagaactattagaaggcagtgaaacagattcacttagtgagcgacctcatcctgtaaaacggtgctctagaagagcacaagcagagcagcagaataatgaacatacaccacagagggagcgccttcatggttctgaaagtgagcagaaaactggaattcttcgatccaatggcagcagtagcacaggacggaagtttggtcctgtagctacccagaaattgaaggtacattttgagaaagatccatatcctagccgtgaaacgaaagagaatatatcagaagaactaggcttgacatttaatcaggtctccagatggttctctagcactcgtcactattcaagggttgcttctgccagaaaagaaatgcatcctgacggccatactagcgagaataatgataccacgactgtagatagcatgcaagcaaggcaacccaacactgtggtgatggaaaagttgactgggaatagaaatgacattgtttctgagaaaccgatggtgcagaacaatcttaaccaaggggtggcagaaaagttgactagggatagaaatgacattgttcctgagaaacaggtggtgcagagcaatcttaaccaatgtaataatgaagatatcccgctttctggaacagaaattgagatggagtcttacgaacaagaatcatctgaaagcagtgatgaagagtggtccacacttagcacaccacgaaaaacaaaattacaaggcaacgaaaaagtatcacttactgaatcactacgttctgcaaaacggtgttctagaagagcaccagctagggagcagaataatgaacatactcagagtgagcaacttcatggttctgtaagtaaacagcaaactgaagttcttcgctccaatgtcagcagtggcgatgcctcaaaatgtcattttggccctatagttactcagaagctgaaggaacattttgaaaaagatccatatccttgccgtgcaacaaaagagggtctggcacaagagctaggactgacatttaatcagatcagtaagtggttctctgccacccatcattattcaagagatgctgttgccaagaaccaaaaatacccaggagaaaatactactgagaataatagtagcacaatctttgatggtatacaagtaatagaacccaattttggtttgatagataaaccagatgcagatacaaatgacatgatttctgaaaagttgatggtacaaattaatcttaacgaaggcattgaagaggatatcccaccgagccaatatactaccaggtgtgaagagaaattaactatgactcaagctgccatctcaagggaagctggacctccaggttatggtcctggagaaaactttcttcaggtcagttcaaggattactagctgtgagcagagtgtgataatggctcctagcgctatcgcaagaggagttggtccaccaggatatacgcctggagaacaccagggcaatggggctccatggaatacaagctatgagcgaagaccgtttacgagtcctgcgactagctcaagagaagtcggacctccaggatatgggcctgaagaaaaccaaggcagtggcatttcctgtaatacaagcagagagcaaatattgtttatgagccctacaaccatctcgagagaacttggtccaccaggatatttgcccagagaaaaccagcgcagtgacacttcatggaatacaagctgcgagtcgggactatttatgagtcctgcgaccacctcaatagaacatggtccaccaggatatgggcctggagaaaaccaggagaatgacagtacaagctgcgagttgagaatgtttaccagtcctacaatcgtctccagagaagttggcccaccaggataccagcagggagtgtttatgagtcctaaaaccatctcaagagaagtctgtcctccaggatttgggtctggagagaaccagggcaacgacactacatggtacaaacagagcgcgtttacaagtcctacaaccatctcgagagaagtcggtccgccagggtatggacaggaagatcagggcaatggtggttcttggaacacgagttgtgagcagggagtgtttacgagtcctactagaggcatctcaagagaagtcggtccgccaggatacgggcccggggaaagtcagggcaataccacttcgtggatttcgacctgccagcagagaatgcttgcaggaatccagagaactggtggctcaaggagtatggacttggaagcctttccaccgggatacggacctggtggtgcttcagggagtgtcataagcccccaagctcggtctgcagagaatgtagaattttcggacgaggctagaaaaaaggctatacagcgggagctgagacggcggcagaagttcaggtga

SEQ ID NO: 212 - protein, 1539 aa, Zea mays
MGRKGSEMSPSKRYPLRSPHSSGRVLRSALANDNKDSEPLNAAAATQAAVKKRSGSQLDSPNSSVRLLHSTSKNKNEVCSGPLNDRIPDKPAANKRKRASPSQVGSSSNSVRVVRSAIKNKDEACSKSLSDRTAGEPAANKRKNVNRSKTGSLSCGVRVLLSASKAKDETSTKPLNDSATVEPASGKRKGTSPSKVGSASNSVRVLRSTSKYKNETCTEPLNDSGAVEPAANKRKGVSRSKERSLNSSVRVVALASNNKIEVSIKPLGNSTAGEPAAKRRKSGSSFEAGSPVSSARVLRPTSERKNEASKPLNESTAAQPAARKKKAGVISKTDNPKIGLRVLRSASGKKNEACIGHVNDSTSAEPTVTKRNRKPSMDRSPKKDYLKICQRVRYILNRMNYQQTFIQAYASEGWKGQSLEKIRPEKELERAKAEILQCKLRIREAFRNMDSLLSKGKLEESLFDSAGEISSEDIFCAVCGSKDVTLQNDIILCDGACDRGFHQNCLNPPLLTEDIPPGDQRWLCPACVCKADSIDALNELQGSKLSIHDSWEKVFPEAASIANGSKQVDTSDLLPDHIKHSDNPALVEGLMVDEVRLSAEDDSKADDLRLSSEDSGDGDFDPSGPDSSEDQKDGLNSEESDFTSDSDDFCAEIAKSCGQDEVSASPLSNVINHTYRMKLRASNNRSNEENHDHVFMDMELGQDMVLPVSSRRQVERLDYKKLYDEAYGKESSNSSDDKEWSGKELLEGSETDSLSERPHPVKRCSRRAQAEQQNNEHTPQRERLHGSESEQKTGILRSNGSSSTGRKFGPVATQKLKVHFEKDPYPSRETKENISEELGLTFNQVSRWFSSTRHYSRVASARKEMHPDGHTSENNDTTTVDSMQARQPNTVVMEKLTGNRNDIVSEKPMVQNNLNQGVAEKLTRDRNDIVPEKQVVQSNLNQCNNEDIPLSGTEIEMESYEQESSESSDEEWSTLSTPRKTKLQGNEKVSLTESLRSAKRCSRRAPAREQNNEHTQSEQLHGSVSKQQTEVLRSNVSSGDASKCHFGPIVTQKLKEHFEKDPYPCRATKEGLAQELGLTFNQISKWFSATHHYSRDAVAKNQKYPGENTTENNSSTIFDGIQVIEPNFGLIDKPDADTNDMISEKLMVQINLNEGIEEDIPPSQYTTRCEEKLTMTQAAISREAGPPGYGPGENFLQVSSRITSCEQSVIMAPSAIARGVGPPGYTPGEHQGNGAPWNTSYERRPFTSPATSSREVGPPGYGPEENQGSGISCNTSREQILFMSPTTISRELGPPGYLPRENQRSDTSWNTSCESGLFMSPATTSIEHGPPGYGPGENQENDSTSCELRMFTSPTIVSREVGPPGYQQGVFMSPKTISREVCPPGFGSGENQGNDTTWYKQSAFTSPTTISREVGPPGYGQEDQGNGGSWNTSCEQGVFTSPTRGISREVGPPGYGPGESQGNTTSWISTCQQRMLAGIQRTGGSRSMDLEAFPPGYGPGGASGSVISPQARSAENVEFSDEARKKAIQRELRRRQKFR

SEQ ID NO: 213 - DNA, 2907 bp, Vitis vinifera
atggatgcttcccctgcccaagagagtaatcggactaggaaaagttctagtcctaaacagaatattttagaagaggccagaaaactttctgaaagtgtgtgtagcgaatcgtcagagcagaaacgtccctctgaaaatggacagcatgagccagcagaaatcagccctgtgctatccaattgtattgttactgaacagtcagaactgcctccagaagatgtgggtgatacaatattaggattgcctccagcagatgtgaccaagaattctcttactgaacatttgggattgcctccagaagatgcaatcaagaatgatggaactgaacaattggggttttttcctgaagttgtgaccaagagttctattattgaaaaattaggacaatcagagccacctcctgaaaatgtggcccggtattctggtcttgaccagtcagggtcagcacccaaagatttggccaataaaagaactgcaaaactagttaaaagaaaatataaattgagatcttcagtaagcggttcccgggttttacgctcaaggtcacaagagaaacctaaagcttcacagccaagtgataattttgtaaatgccagtgctagcagagaaaggaaaggaagaaagaagaaaaggatgaataaaacaactgcagatgaatttgcgagaatcaggaaacatcttagatatttactgaacagaatgagctatgagcaaaatctgattgatgcttattctgccgaaggttggaaaggacaaagtgtggaaaaattaaagccagagaaggaacttcaacgtgcctcatctgaaatttctcgtcgcaaactgmaaatacgtgatctatttcaacatcttgattcattatgtgctgaaggaaggtttccagaatctttatttgattctgaagggcagattgacagtgaggatatattctgtgctaaatgtgagtccaaagacatgtctgctgataatgacataatactctgtgacggtgcttgtgatcgtggatttcaccagttttgtctggaaccgccattgttaaaagaagaaattcctcctgatgacgagggttggctgtgccctgcatgtgattgcaaagttgactgcatggacctgcttaatgactctcaaggaacaaaactttctgtaattgatagctgggagaaggtttttcctgaggcagctgcagctgggaataaccaggataacaactctggattttcatcagatgattctgaggataatgattatgaccccgattgtccagaggttgatgagaagggtcagggagataagtcaagttctgataaatttgatgaatctgatgaatttgacgaatctgatgaatctgatttcacttctgcatctgatgatatggtggtctcaccraataatgagcagtgtttggggcttccttctgatgattcagaggatgatgattttgatcctgatgctccagaaattgatgaacaggttaatcaggggagttcaagttctgattttacatctgactccgaggattttactgccactttagatcgcagaaacttctctgacaacgaggatggtcttgatgagcaaagaagatttggtaggaagaagaaagatactttaaaggatgagctcttatccgtgttagagtcaaattctggtcaagataatgcacctctgtctgcaaagagacatgtagaaaggctggattacaaaaagctgcatgatgaggcatatggaaatgtttcttctgattcaagtgatgatgaagactggacagagaatgttataccaagaaagaggaagaatcttagtggtaatgttgcctcagtgtcaccaaatggaaacacttcaatcactgagaatgggacaaataccaaggacataaagcacgacttggaagcagctggatgcactcccaagcgaagaactcgtcagaagctgaactttgaaagcacaaataattcacttgctgagtcacataaaggttctcgaagtcctggttctactggtgaaaaaagtgggcaatcatcatataaaaaacttggagaagctgtaactgagagactctacaaatccttccaggaaaatcagtaccctgatcgtgctatgaaagaaaaattggcagaagagctgggaataacgagccggcaggttagcaaatggtttgagaatgcccgttggagctttcgccatcgaccacccaaggaagccagtgcgggtaaaagtgctgtgaaaaaggatgcatccacgtctcaaacagatcaaaagcctgagcaagaagtggttcttagagaaagttctcacaatggagtgggaaaaaaggagtcgcccaaagcaggtgcttcgaaggtagaccgcagcaaggaagccaatgcaggtaaaagtgctgtgaaaaaggatgcatccacgtctcaaacagatcaaaagcctgagcaagaagtggttattaaagaaagttctcacaatggagtgggaaaaaaggagtcgaccaaagcaggtgcttcgaaggtagaccgctgcagtggagctaagaggagaaggaaattggcaactgatggaagccatagacagaaatcttcaactcccaactctacaagacaaaagacaaagtcaaatcatgaagcatctgaggcaaccaatggaagcagaaggcagaattcttctactcccaagtctagaaggcaaaagactaagttagctggtgaagcgtctgaagcaactggtggaagcagtagacagaattcgtcaaccccaaattctaaaaggcgaaaaaccaagtcagatcatgaagcatctaatcccgtccttagcggtaagaagatagcaaagacggcaaagagctcatctggcacaccaaaaacaaaggaaaagctaagtgacagaatccaaacaagaagtaggaaatctattgcttga

SEQ ID NO: 214 - protein, 968 aa, Vitis vinifera
  UNSURE (276)..(276): Xaa can be any naturally occurring amino acid
MDASPAQESNRTRKSSSPKQNILEEARKLSESVCSESSEQKRPSENGQHEPAEISPVLSNCIVTEQSELPPEDVGDTILGLPPADVTKNSLTEHLGLPPEDAIKNDGTEQLGFFPEVVTKSSIIEKLGQSEPPPENVARYSGLDQSGSAPKDLANKRTAKLVKRKYKLRSSVSGSRVLRSRSQEKPKASQPSDNFVNASASRERKGRKKKRMNKTTADEFARIRKHLRYLLNRMSYEQNLIDAYSAEGWKGQSVEKLKPEKELQRASSEISRRKLXIRDLFQHLDSLCAEGRFPESLFDSEGQIDSEDIFCAKCESKDMSADNDIILCDGACDRGFHQFCLEPPLLKEEIPPDDEGWLCPACDCKVDCMDLLNDSQGTKLSVIDSWEKVFPEAAAAGNNQDNNSGFSSDDSEDNDYDPDCPEVDEKGQGDKSSSDKFDESDEFDESDESDFTSASDDMVVSPNNEQCLGLPSDDSEDDDFDPDAPEIDEQVNQGSSSSDFTSDSEDFTATLDRRNFSDNEDGLDEQRRFGRKKKDTLKDELLSVLESNSGQDNAPLSAKRHVERLDYKKLHDEAYGNVSSDSSDDEDWTENVIPRKRKNLSGNVASVSPNGNTSITENGTNTKDIKHDLEAAGCTPKRRTRQKLNFESTNNSLAESHKGSRSPGSTGEKSGQSSYKKLGEAVTERLYKSFQENQYPDRAMKEKLAEELGITSRQVSKWFENARWSFRHRPPKEASAGKSAVKKDASTSQTDQKPEQEVVLRESSHNGVGKKESPKAGASKVDRSKEANAGKSAVKKDASTSQTDQKPEQEVVIKESSHNGVGKKESTKAGASKVDRCSGAKRRRKLATDGSHRQKSSTPNSTRQKTKSNHEASEATNGSRRQNSSTPKSRRQKTKLAGEASEATGGSSRQNSSTPNSKRRKTKSDHEASNPVLSGKKIAKTAKSSSGTPKTKEKLSDRIQTRSRKSIA

SEQ ID NO: 215 - DNA, 2805 bp, Populus tremuloides
atgtctgaggctgagaacatgggtgtttctccatcacaagttagttctcaaactaaaagttactcatgcccttcacaaactaaactggaaaatactcatggatttactgctgaatacaactgtggtggatattcggaagagaaacataagcttgagtctgaaatcatacaaactgaagccggagatagcggtactgcagttctccaatctggtgctggggaaactgtggaaccatctactgaagatgtaacaaacaattcttttactgatttggatccacctcccgaagatgccaggggtgctacttttgatgaaagttcaagacctatactaactgctatagatcagaaactcgagccaggtgctagaagtgtgaatactgcgtgtacgcatggtgaatcatcaaaagcaactgactctggtattctacaggatgaacctggaaataccaatgctgcatcatcaagctgcattgctaatgaaacctcacaagcatcacttgaaaatctagccaataattcttgtactgaagatgtgggtccgccgtatggagatgcaagcaagggtaaccagattgataaaagttcataccctcaacaaactatatctggacatacacttgagttactttctgacagagcttgttgtgaacgatcagaagaaagacagaagcctggatctgaactttcagaaaatgaatcaacgggaattgacactgaattatatagtggcattgctatcgagaattcagagccgcttactcaactagtgaccaagagttctcctatcaaacatgtaggcttgcttcctggtgacagcatcatcattcctgcaaatgaacaaacaagaccaactcatgatgatgaggacaaaggcccagatcatgaacatttggaaacaccatctagagttgcgattggtattactagacgcggtagacctagaggtaagagtgcttcaagattgtcaaggaagatatatatgttaagatctttgagaagtagtgatagagttctccggtcaagatcacaagagaaacctaaagctcctgaatcaagtaataattcaggtaatgttaattccactggtgataaaaaagggaaaagaaggaaaaagagaagaggaaagaatattgtggctgatgaatattccaaaatcagggcacatcttaggtacttattgaatcggatgagctatgagcaaagcttgatcactgcttattctggggaaggctggaaaggacttagcctagaaaagttaaagcccgagaaggagttgcagcgagccacatctgaaattaccagacgcaaagtgaaaataagggatttatttcaacatattgattctctgtgcagcgaaggaaggttcccatcatctttatttgattctgaaggacagattgacagtgaggatgtattctgtgcaaaatgtgggtccaaagatttgaatgctgataatgatattatactatgtgatggtgcttgtgacagaggatttcatcagttctgtttgataccaccattgttaagagaagacattcctcctgatgatgagggctggttatgccctggatgtgattgcaaagttgactgcattggtttgcttaacgattctcaaggaacaaatatatctatcagtgatagctgggagaaagttttccctgaggctgccgccacagcgtctggacaaaaactggatcacaactttggaccatcttctgatgattctgatgataatgattatgaacctgatggtccagatattgataagaagagtcaggaggaggaatcgagctctgacgaatctgacttcacttctgcatctgatgaattcaaggctcccccggatggcaaagagtacttggggctctcttctgatgattcagaggatgatgactatgatcctgatgctccagttcttgaggagaagctgaagcaggaaagttcaagttctgattttacatcagactctgaggatcttgctgcaactattaatggtgatgggttgtctttagaagatgaatgccacatgcctattgaacctcgtggagtttctaatgggaggaaatctaaatttgatggaaagaagatgcagtctttaaacagcgagcttttatccatgctagaaccagatctgtgccaagatgagtcagcaactgtttctggaaaaagaaatgttgacagattggactacaagaagctctatgatgaaacgtatggaaacatttctacttcaagtgatgatgattacactgatactgttgggccaaggaagaggaggaaaaatactggagatgttgctacagtgacagcaaacggagatgcctctgttaccgagaatggaatgaatagcaagaatatgaaccaggaattaaaggagaacaaacgtaatcctgagagaggaacttgccaaaactcgagctttcaagaaacaaatgtttccccggctaaatcatatgttggtgcatctctatctggttctagtggtaaaagcgttaggccctctgcttataaaaaacttggagaagctgtaactcagagactgtacagttacttcagggaaaatcagtatccagaccgagctgcaaaagcaagcttggcagaagagctaggaattacttttgagcaggttaacaagtggtttgtgaatgcccgttggagcttcaaccattcatcatctacaggtacaagtaaagctgaaagtgcttctggaaaaggtagctgtgatggccaagtgagggatagtgaatcgaagaaccgaaagagcaataaacaaaaaactaacaccccgaaatctaggagataa

SEQ ID NO: 216 - protein, 934 aa, Populus tremuloides
MSEAENMGVSPSQVSSQTKSYSCPSQTKLENTHGFTAEYNCGGYSEEKHKLESEIIQTEAGDSGTAVLQSGAGETVEPSTEDVTNNSFTDLDPPPEDARGATFDESSRPILTAIDQKLEPGARSVNTACTHGESSKATDSGILQDEPGNTNAASSSCIANETSQASLENLANNSCTEDVGPPYGDASKGNQIDKSSYPQQTISGHTLELLSDRACCERSEERQKPGSELSENESTGIDTELYSGIAIENSEPLTQLVTKSSPIKHVGLLPGDSIIIPANEQTRPTHDDEDKGPDHEHLETPSRVAIGITRRGRPRGKSASRLSRKIYMLRSLRSSDRVLRSRSQEKPKAPESSNNSGNVNSTGDKKGKRRKKRRGKNIVADEYSKIRAHLRYLLNRMSYEQSLITAYSGEGWKGLSLEKLKPEKELQRATSEITRRKVKIRDLFQHIDSLCSEGRFPSSLFDSEGQIDSEDVFCAKCGSKDLNADNDIILCDGACDRGFHQFCLIPPLLREDIPPDDEGWLCPGCDCKVDCIGLLNDSQGTNISISDSWEKVFPEAAATASGQKLDHNFGPSSDDSDDNDYEPDGPDIDKKSQEEESSSDESDFTSASDEFKAPPDGKEYLGLSSDDSEDDDYDPDAPVLEEKLKQESSSSDFTSDSEDLAATINGDGLSLEDECHMPIEPRGVSNGRKSKFDGKKMQSLNSELLSMLEPDLCQDESATVSGKRNVDRLDYKKLYDETYGNISTSSDDDYTDTVGPRKRRKNTGDVATVTANGDASVTENGMNSKNMNQELKENKRNPERGTCQNSSFQETNVSPAKSYVGASLSGSSGKSVRPSAYKKLGEAVTQRLYSYFRENQYPDRAAKASLAEELGITFEQVNKWFVNARWSFNHSSSTGTSKAESASGKGSCDGQVRDSESKNRKSNKQKTNTPKSRR

SEQ ID NO: 217 - DNA, 2793 bp, Populus tremuloides
atgtccgaggctgagcacatgggtgtttctccatcaaaagtttctcatactaaaagttattcatgccctgcacaaactacactggaaaatacgcatgaacccagtgctgaatacaagtttggtggatatccggaagagagacataagcttgagtgtgaaatcatacaaactgaagctggagataacagggctgcagttctccaatcttgttctggtgaagttgtgcaaccatctactgacgatttaacaaaaagtcctcttattgatttggacccacctcctgacgatgcaaggagtgctctgtttgataatagtccaagacctatatcaaccgctatggatcagaaacttgagccaggtgctacaagtgtgaatactgcttgtgtgcatagtgaatcatcaaaagcaattgactctagtattctactggatgaacctaggaatagcaacacagaattgtcaagctgcattgcaaatgaaacctcacaagcatcacttgaaggtctagccaatgattctcgtgctgaagatgcaggactgtcacttgtagaggcaagcaatagtgacctgattgatgaaagttcatactctcaacaaactacatctggacagacacgtgagtttcattctgacagagcttgttgtaaaccattggaagaaagacagaagcccggctctgaacttgcagaaaatgaatcaatggaaattggcattggattacccagtggtattgctattgagaatttggagccgcttactgaacttgtgaccaagagttgtcctatcaaacatataggcttgcctcctggtgatgacatcagcattcctgcaaatgaacaaataagacctactcatgataaggagtccaaataccctgattgtgaacatttggaaaaactatctggaattgtgattggtattactagtcaaggtgtacccagtgttaagagaacttcaaaattgtcagggaagaaatatacaagttcttcgagaaaaagtgatagagttctccggtcaaattcacaagagaaacctaaagctcccgagccgagtaataattctactaatgttaattccactggtgaggaaaaagggaaaaggaggaaaaagagaagagggaaaagtatagtggctgatgaatattccagaatcagggcacgtcttaggtacttgttgaatcggatgagctatgagcaaagcttgatcactgcttattccggggaaggctggaaaggacttagtctagaaaagttaaaacctgagaaggagttgcaacgggccacatctgaaatcatcagacgcaaagtgaaaataagggatttatttcaacatattgattcactatgcggtgaaggaaggttcccagcatctttgtttgattctgaaggacaaattgacagtgaggatatattctgtgcaaaatgtggatccaaagatttgactgctgataatgatattatactatgtgatggtgcttgcgaccgagggtttcatcaattctgtttggtaccaccattgttaagagaagacattcctcctggtgatgagggctggttatgccctggatgtgattgcaaagttgactgcattgacttgcttaatgactctcaaggaacaaatatatctatcagtgacagatgggataatgttttccccgaggcagctgcagtagcatctggacaaaaactcgactacaactttggattgtcttctgatgattctgatgataatgattatgatcctgatggtccagatattgacgagaagagtcaggaggaatcaagctctgacgaatctgacttcagttctgcgtctgatgaatttgaggctccacctgatgataaacagtacttggggctcccttctgatgattcagaggatgatgactatgatcctgatgctccagttctcgaggagaagctgaagcaggaaagttccagttctgattttacttcggactctgaggatcttgatgccactcttaatggtgatgggttgtctttaggagatgaataccacatgcctattgaacctcatgaagattctaatgggcgaagatcgagatttggtggaaagaagaatcattctttaaacagcaagcttttatccatgctagaaccagattctcaccaagaaaagtctgcacctgtttctggaaaaagaaatattgaaagattggactacaagaagctctatgatgaaacatatggaaacatttgtacttcaagtgatgatgatttcactgatactgttgcaccaaggaagaggaggaaaaacactggagatgttgctatggggatagcaaatggagatgcttctgttactgagaatggattgaatagcaagaatatgaatcaggaattaaagaagaatgaacatacttctgggagaactcaccaaaactcgagctttcaagatacaaatgtttccccagcaaaaacacatgttggcgaatctctctctggttctagcagtaaaagagttaggccctctgcttataaaaaacttggagaagctgtaactcagaaactgtacagtttcttcaaggaaaatcggtatcctgaccaagctgcaaaggcaagtttggcagaagagctaggaattacttttgagcaggttaacaagtggttcatgaatgctcgttggagcttcaaccattcatcacctgaaggtacaagtaaagctgaaagtgcttcaggaaagggtagctgtgatgggcatgtgagggatagtgaatcgaagaaccaaaagagcaataaacaaaaaactagtaccccaaaatctaggagatag

SEQ ID NO: 218 - protein, 930 aa, Populus tremuloides
MSEAEHMGVSPSKVSHTKSYSCPAQTTLENTHEPSAEYKFGGYPEERHKLECEIIQTEAGDNRAAVLQSCSGEVVQPSTDDLTKSPLIDLDPPPDDARSALFDNSPRPISTAMDQKLEPGATSVNTACVHSESSKAIDSSILLDEPRNSNTELSSCIANETSQASLEGLANDSRAEDAGLSLVEASNSDLIDESSYSQQTTSGQTREFHSDRACCKPLEERQKPGSELAENESMEIGIGLPSGIAIENLEPLTELVTKSCPIKHIGLPPGDDISIPANEQIRPTHDKESKYPDCEHLEKLSGIVIGITSQGVPSVKRTSKLSGKKYTSSSRKSDRVLRSNSQEKPKAPEPSNNSTNVNSTGEEKGKRRKKRRGKSIVADEYSRIRARLRYLLNRMSYEQSLITAYSGEGWKGLSLEKLKPEKELQRATSEIIRRKVKIRDLFQHIDSLCGEGRFPASLFDSEGQIDSEDIFCAKCGSKDLTADNDIILCDGACDRGFHQFCLVPPLLREDIPPGDEGWLCPGCDCKVDCIDLLNDSQGTNISISDRWDNVFPEAAAVASGQKLDYNFGLSSDDSDDNDYDPDGPDIDEKSQEESSSDESDFSSASDEFEAPPDDKQYLGLPSDDSEDDDYDPDAPVLEEKLKQESSSSDFTSDSEDLDATLNGDGLSLGDEYHMPIEPHEDSNGRRSRFGGKKNHSLNSKLLSMLEPDSHQEKSAPVSGKRNIERLDYKKLYDETYGNICTSSDDDFTDTVAPRKRRKNTGDVAMGIANGDASVTENGLNSKNMNQELKKNEHTSGRTHQNSSFQDTNVSPAKTHVGESLSGSSSKRVRPSAYKKLGEAVTQKLYSFFKENRYPDQAAKASLAEELGITFEQVNKWFMNARWSFNHSSPEGTSKAESASGKGSCDGHVRDSESKNQKSNKQKTSTPKSRR

SEQ ID NO: 219 - DNA, 2184 bp, Populus tremuloides
atgggtgattctggaaagaaatcaaagcagcaagacttgcacgaatcttcaccatctgacacagtgaatgggtcgttgctgattaaatcattgaagataaagaagggtggcaaattatctcatagaaaaagcgaaaaacctaaaactaaacctcatctgaaaactatcattaattcatctgtatcaaagaaaaaggttactcctaagaagggcatcaggaatggctctaccagtagaagattgattcacaggaaaattctgcataaagcacttgataagaaggcctcaagaaatggggcttcctcagagctccaaggcaaacagttgtcaactattgattctgaggggaatggaaaaaatgccgatgaaggtgcaattaaaaaagtcaagaagaggaagcctaagaaaaggcaaaaggacaaggtaaagctagatgaaccaccacgcttgcagaggagagcaaggtacttgatgattaaaatgaagctggagcagaatcttatagatgcttactctggagaaggttggaaaggtaaaagtcgagagaagattcggccagaaaaggaactactgagagccaggaaacagattttgaaatgtaaacttggattacgtgaaataattcggcaggtggattctctaagtacagtaggatgtattgaagatgctgttatggctccagatggatctgtttcccatgaacatatattctgtgcgaagtgcaaattgaatgaagtttcccaagataatgatattgtactctgtgatgggacatgcaactgtgccttccaccaaaaatgccttgatcctcctttggatactgaaaatatacctccaggagatcagggatggttttgcaagttctgtgactgtaggatggaaattatagaagccatgaatgctcatttggggacccacttctcagaggacagcggttggcaggatattttcaaagaagaagcagcagttccagatggtggaaatatgctattaaatccagaagaagaatggccttctgatgattctgaagatgatgattatgatccagagaggagagagaacgtcatgagtggagcaggtactgatgatgatgcatctgatgacaccagcaattcaacccgcttgagttggtcttcagatggtgaggttttttcaggatccaggaggtgggaggtggacggcttggacttcagaaacaattctatttatagcagtttagattctgatgaaaccagtgatggggaaattatttgtggccgtaggcagagaagagcggttgattataagaagttatacaatgagatgtttggaaaggacgctcctgcacatgagcaacccagcgaagatgaagattggggtcctagcaaaagaaagcgacgagagaaggagtcagatgcagccagcaccctaatgactctatatgaaagtaaaagaagatgtaaaaatgatgcaaccattgaaggcatgatgaagcttccacgagatcctcaaattcgaaggccaattttcaggctcccccctgatgctgttgagaaacttcgccaagtatttgcagagaatgaacttccatctagaactgtcaaggagaatctatcaaaagaattgggccttgaacctgggaaggttagcaaatggttcaagaattcccgttatttagctctgaagtctagaaaggtagagaagggagaacaagttcattattctagttccaaagtctctgctgaacccactttaaatgtcatgaaggacaaaactgctgatctttcactgttaaaggatagccaggcagaaactggggtgtgtaccccagagaatttgaaaaggatcttgcagaggaagaagccgaggtcaataagtaaaagtttaaagaaaaatgaacagaaaagaggttccttcgaatcacctactaaaagcaatgagatgaatgttgagcacaatgatgatctgagcttgaagaagctgttaaaagcaaaaacaaagggagtaaagaaaaagggtaatcgtatttcagcagctgctgaatctgatatggagaaactttgtagagcaaagacgagagtagagaatctgaagcagaaactggtgaaactacaaactggcaaagctaggaagtcttccaaaatccgtccgctagacgaatctgttgtctacgttcctattgctgagctaagagaaaagaaatga

SEQ ID NO: 220 - protein, 727 aa, Populus tremuloides
MGDSGKKSKQQDLHESSPSDTVNGSLLIKSLKIKKGGKLSHRKSEKPKTKPHLKTIINSSVSKKKVTPKKGIRNGSTSRRLIHRKILHKALDKKASRNGASSELQGKQLSTIDSEGNGKNADEGAIKKVKKRKPKKRQKDKVKLDEPPRLQRRARYLMIKMKLEQNLIDAYSGEGWKGKSREKIRPEKELLRARKQILKCKLGLREIIRQVDSLSTVGCIEDAVMAPDGSVSHEHIFCAKCKLNEVSQDNDIVLCDGTCNCAFHQKCLDPPLDTENIPPGDQGWFCKFCDCRMEIIEAMNAHLGTHFSEDSGWQDIFKEEAAVPDGGNMLLNPEEEWPSDDSEDDDYDPERRENVMSGAGTDDDASDDTSNSTRLSWSSDGEVFSGSRRWEVDGLDFRNNSIYSSLDSDETSDGEIICGRRQRRAVDYKKLYNEMFGKDAPAHEQPSEDEDWGPSKRKRREKESDAASTLMTLYESKRRCKNDATIEGMMKLPRDPQIRRPIFRLPPDAVEKLRQVFAENELPSRTVKENLSKELGLEPGKVSKWFKNSRYLALKSRKVEKGEQVHYSSSKVSAEPTLNVMKDKTADLSLLKDSQAETGVCTPENLKRILQRKKPRSISKSLKKNEQKRGSFESPTKSNEMNVEHNDDLSLKKLLKAKTKGVKKKGNRISAAAESDMEKLCRAKTRVENLKQKLVKLQTGKARKSSKIRPLDESVVYVPIAELREKK

SEQ ID NO: 221 - DNA, 2460 bp, Ostreococcus tauri
  misc_feature (178)..(178): n is a, c, g, or t
  misc_feature (214)..(214): n is a, c, g, or t
  misc_feature (1375)..(1375): n is a, c, g, or t
  misc_feature (1381)..(1381): n is a, c, g, or t
  misc_feature (1648)..(1648): n is a, c, g, or t
  misc_feature (1684)..(1684): n is a, c, g, or t
atgaatgaggtgcgcgacgcggaggaacgatgtaaacgtcgtgtgcgagcggtcgcggacgcggtgcggaagggaggcgtggtgtgggcgatcgtggggtggaaagatagtcaatgcgcgcgcgcggcgtccgacgcgcgcgttgttggagattgggcgcgcgcgatgtgtgtgagangactgacgatgcatcgatcggtggttgatgatacgnagtttgcgctcgcgcgatcgcggatacagtcgcagttcgcgacgattcgaagacatcaggcgttggtggaagcgtacgcgagcgacggctggcgcggacaggcggctcaaaagccgaaaccagtcagggagattgaaaaggcgcgcgagaagatattcgagggtaaattgaagatacgggagtattttaaggttttggagttcgatgagcgcgagcgcgagatcacgacggtggcggacgagtttggggagtgcgacgccgcggatattttttgtagcaagtgcaccctcgcagacgacaggcatgacgacgatattttgctctgcgatggcttctgcgatcgtgcgtatcatcaatcatgcgtggctccaccggttttggcggaagacattccgcccgaggacgaaggttggctctgtccgagatgcgacgcgcgagtggacgtcatttacgtcttgaacgacgagtacgatcaaaatttgggccagaggtgtgtttcagcggatattttcgttgcagaggcggacatgcgagataaagggatcgttccaggaacggcgcagttcaaacacgcgcacgaagaggattggccgagcgatgagagcgatgacgaggacttcgatcagggcggacacagcgacgatgggcgagacgacgagcacgaggcgctgagcggaagcgcacagtcatcgagcgatgaatcgagcagcgaatcagagtctgatctcatcatcgagggcccacgaaggcgcacgaaggttgattacgtcgccctgaacaacgccatgttcggcgacagcgaggcgtacgagggcgaagctgaggagctcggttggaaacgcagcaacaaaaccaaggcggagatgctcgcggcgctcaagggtgagagcgcgaacgggataacgaacggtgccacgaagaaggatccaaaatcaaaacgctcgaagcgagagcgcgtggatgagaaatctcccgcaccgcgcgtcaggttcactcccgatcaaaaacttgagctcgagcgtgtcttctccgagtgcgcgtcgctcgacattgacgcgcgcgacgccctcgcgaagcgactcgggatacccggcggcgcaaattcgattaaaatatggttcatgaatcgccgtcgtagggctaagattttgggtgagaggnaatacngacagcacgataatccacgtcccgctcgctcgttcgacgcctcgtcacaaacaacctctgaaaaaccttcaagtcacctcagaagctcacgcgcgtctcaaacatgtcgatcgcccctaaacgcgcccccaaactcatatacttctccgcgtggttctgcccgttcgcccatcgagcgacgctcgcgttggagcattacgcgcacggcggagagatttcctacgagtggaaggaatcgctcggtgaggtcacgcttcgttgacattngacgctcgaatgcgacgaaacttgagcgcctcgacngaccggagacgaatcgccgcgtaggatgggaaaaacgcaagtcaacctcgagtgaggtgaagacgaaacacgagaattggtaccattacaagtccccagagctactgagacacaacccgctgggcatggtgccgacactcgtgacgccggcgacgtatgaggataaagatggagatccatcgcggaacgtggtgacggagagcttggtgtgcgtacagtttatcgatgaactcgttcggggaaacgcgtacgccggggagacggcggcgatcatgccgagcgacccgtacgcgcgcgcgaaggcgagagtggacgccgactgggtgaacaaaaacgtatgctcgaggtattatcacgtcctggtgcgacaagaggcgagcgagcagagagaagcgtttgaaaagctcgtggaggggctggagacattcgcggcgtggtgcggcagcggagaagggaagttctatggtggacaaacgacgcccggattggtggactacgcgctctttccatgggcgtggcgcctcccggtgttcgagcactaccgcgggatggatttcaagattcctcgcaccgcggcactgaaatcgtatcacgattggatggaagccatgctcgcgcgagagcaagttcgcaagacgcttccaccgtgggacgattacttggaacacattggacgatacgccgacgggagcgcgcgatcgaaagtcgccaacgcagtccgcagcggccgtgcggcgcacgattacgacgacaaggaggacaacaccgatagttga

SEQ ID NO: 222 - protein, 819 aa, Ostreococcus tauri
  UNSURE (60)..(60): Xaa can be any naturally occurring amino acid
  UNSURE (72)..(72): Xaa can be any naturally occurring amino acid
  UNSURE (459)..(459): Xaa can be any naturally occurring amino acid
  UNSURE (461)..(461): Xaa can be any naturally occurring amino acid
  UNSURE (550)..(550): Xaa can be any naturally occurring amino acid
  UNSURE (562)..(562): Xaa can be any naturally occurring amino acid
MNEVRDAEERCKRRVRAVADAVRKGGVVWAIVGWKDSQCARAASDARVVGDWARAMCVRXLTMHRSVVDDTXFALARSRIQSQFATIRRHQALVEAYASDGWRGQAAQKPKPVREIEKAREKIFEGKLKIREYFKVLEFDEREREITTVADEFGECDAADIFCSKCTLADDRHDDDILLCDGFCDRAYHQSCVAPPVLAEDIPPEDEGWLCPRCDARVDVIYVLNDEYDQNLGQRCVSADIFVAEADMRDKGIVPGTAQFKHAHEEDWPSDESDDEDFDQGGHSDDGRDDEHEALSGSAQSSSDESSSESESDLIIEGPRRRTKVDYVALNNAMFGDSEAYEGEAEELGWKRSNKTKAEMLAALKGESANGITNGATKKDPKSKRSKRERVDEKSPAPRVRFTPDQKLELERVFSECASLDIDARDALAKRLGIPGGANSIKIWFMNRRRRAKILGERXYXQHDNPRPARSFDASSQTTSEKPSSHLRSSRASQTCRSPLNAPPNSYTSPRGSARSPIERRSRWSITRTAERFPTSGRNRSVRSRFVDIXRSNATKLERLDXPETNRRVGWEKRKSTSSEVKTKHENWYHYKSPELLRHNPLGMVPTLVTPATYEDKDGDPSRNVVTESLVCVQFIDELVRGNAYAGETAAIMPSDPYARAKARVDADWVNKNVCSRYYHVLVRQEASEQREAFEKLVEGLETFAAWCGSGEGKFYGGQTTPGLVDYALFPWAWRLPVFEHYRGMDFKIPRTAALKSYHDWMEAMLAREQVRKTLPPWDDYLEHIGRYADGSARSKVANAVRSGRAAHDYDDKEDNTDS

SEQ ID NO: 223 - DNA, 2076 bp, Aquilegia formosa x Aquilegia pubescens
  misc_feature (692)..(713): n is a, c, g, or t
  misc_feature (1459)..(1462): n is a, c, g, or t
atgcaagatggtgggaaccttggttttccaaagaaacgtgttggatcccaaataaatacctcatttcagaagaagaatagttgcaaaaatccgcatattaggagatggaaaccaaagccaagatctcatgtcaagacaattgcttcgttcttgtcgaagagaaagacatctgagctctcaagcaacagagccagaaataaatgttccaatggaaaaccttttagaagaagagcgtcacagaaacccaatgataccagtccttctgataggccactttcatcaatgcttaaagatttcaaatcgttaagcaataaatgtcagggacgtgaaaagacaactgacaaggatcttggaagtcaaaaggctcacagaaggagaaggagcaagaagaggaagaatgaggagttagatgaagccgctcgagtccaaagaagaacaaggtacctcctgattaaaatgaagctggagcagaaccttattgaggcttactctggggagggttggaaaggccagagtcgtgagaaaattaagccagaaaaggaactgcaaagagccaagaagcagatattgaagtgcaaacttggaattcgtgatgctattcgtcagctggaatctcttagttctgagggaagcattgaagattctgtgataggttcagatggatctgttttccatgaacatattttctgttnnnnnnnnnnnnnnnnnnnnnnagcatttccagataatgacattatactgtgtgatggagcatgcaattgtgctttccaccagaaatgcctggagcctccattagccactgaaaatattcctcctggtgatcaagggtggtattgcaaattttgtgagtgcaagatggcaatacttgatgcaatcaatgcacatcttgggactcagttttctctagacagtaaatggcaagatattttcatggaagcagctaatgcacgcgataatgaggatatctcaattcatcctgatggtgactggccatctgatgactctgaagatgttgattatgacccagaaaaatatgaaattgattgcagctatagcagaatgggctcggagcacaacgtgtctgacgatgcaagtagttccggcaccttgtattggacttccgaagaagatgatggtttgcattctgagcgattcagaactgatggtagtctggaggggggattttatggggataaaactaaaatccagagttctgatagcatagattccaatgacagtactgatggtatggcatttcatcgtaggcagcgaagagatgttgattataagaaactgcatgatgaaatgtttggtaaagatatgcctgaaagtgaagaaatcagtgaagatgaagattggggacctagaagaagaaagcgcagaagaaatgagtctaatgcagccactactttagtatcttcgtgtggtactgagaatgaattttcgaatgtggcacttnnnntaccatcaagagtggtcagggagagtctctcgaagcaattgggtattgcaattgagaagatcaacaagtggttcaagaatgctcggtatacagctttaaaaattagaaaggcagaaaagactgaacaatcccctggaggtggcaagatgcaaagtgctgacgtattaacatcaaaggaaaaccattatttggtctcaacaggaacagcagtccaaagatccaaagtttcgagtgtccatagaagtaaaaaccgtaaattgacaaccacaccctcaagggaagtacaagagaaagtgtctgctgttgcaccatccgctactgcaaatgaggtgagtgtacagttaagaaaagcagtgagcgtagagaaggaaatgggcagtgtaaaaagaaaatctgcacaagtaaagaggatcaagcgcacatgctccactaaggagcagcagctatacatgattgagttggagagaatttgccgtcttgaggagaagcttgaaaagatgaagaaggtattgcttagtatagatgacaatcatagtaatgtatcagatggaccccatatgaacgaacagtctgccgtatacattccagttgcagagctaagagaaaagatgtga

SEQ ID NO: 224 - protein, 691 aa, Aquilegia formosa x Aquilegia pubescens
  UNSURE (231)..(238): Xaa can be any naturally occurring amino acid
  UNSURE (487)..(488): Xaa can be any naturally occurring amino acid
MQDGGNLGFPKKRVGSQINTSFQKKNSCKNPHIRRWKPKPRSHVKTIASFLSKRKTSELSSNRARNKCSNGKPFRRRASQKPNDTSPSDRPLSSMLKDFKSLSNKCQGREKTTDKDLGSQKAHRRRRSKKRKNEELDEAARVQRRTRYLLIKMKLEQNLIEAYSGEGWKGQSREKIKPEKELQRAKKQILKCKLGIRDAIRQLESLSSEGSIEDSVIGSDGSVFHEHIFCXXXXXXXXAFPDNDIILCDGACNCAFHQKCLEPPLATENIPPGDQGWYCKFCECKMAILDAINAHLGTQFSLDSKWQDIFMEAANARDNEDISIHPDGDWPSDDSEDVDYDPEKYEIDCSYSRMGSEHNVSDDASSSGTLYWTSEEDDGLHSERFRTDGSLEGGFYGDKTKIQSSDSIDSNDSTDGMAFHRRQRRDVDYKKLHDEMFGKDMPESEEISEDEDWGPRRRKRRRNESNAATTLVSSCGTENEFSNVALXXPSRVVRESLSKQLGIAIEKINKWFKNARYTALKIRKAEKTEQSPGGGKMQSADVLTSKENHYLVSTGTAVQRSKVSSVHRSKNRKLTTTPSREVQEKVSAVAPSATANEVSVQLRKAVSVEKEMGSVKRKSAQVKRIKRTCSTKEQQLYMIELERICRLEEKLEKMKKVLLSIDDNHSNVSDGPHMNEQSAVYIPVAELREKM

SEQ ID NO: 225 - DNA, 1743 bp, Glycine max
  misc_feature (261)..(261): n is a, c, g, or t
aagaagaaaagacaaaggaataacatagatgttgatgatgcttcacgcttgcgaaggagaacaaggtacctcttaatcaaaatgaagctagagcagaaccttattgatgcttactctggagaaggttggaaaggtcaaagtcgggaaaagattaggccagaaaaggagctactacgagcaaaaaagcagattttaaaatgtaaacttagtattcgcgatgccatacaccagctggattctcttagttctgtgggtagcatngaagattctgccattgctccagatggatctgtttatcatgaaaatatattctgtgccaattgcaaactacatgaagctttcccagataatgatattatactctgtgatggcacttgcaatcgtgcttttcaccaaagatgtctcaatcctcctttggatactgaaaatattcctcctggagatcaaggctggttttgcaagttttgtgaatgtaagatagaaatactagaggcaacaaatgcccatcttgggactcaattctccctagacagtaattggcaggatgtattcaaggaagaggctgctatgcctgatggtgacattgcattactaaatcctgaagaagaatggccatcagacgatcctgaagatgatgattacaatccagagaggaaagaagacaaccacaactttgacacagaaggagctgatgaaaatgcatccaatgattcaaccagttgttccagtctgttgtctttgaatggcgaatgtcctccagtagatgaaggcatctgtcatgaatattattctgttaatagctgcttagattctgatgaatctggggaaatagcatgtggtcctaggcagcgtaaagctgttgactacaagaaactctatgatgaaatgtatgggaaggatgctccaccttgtgaacaaatgagtgaagatgaagactggggtcctggcaaaagaaagcgaagagaaaaggagtctgatgctgttgattctcttatgactttgcatgaaagtgagaataggcatcccaataatgagcacaacatgacaagtaaagattcttcaagcataaagatcaaaaggcattgttttaggattccacgtgatgcagttgagaggcttcgccaagtttttgctgagaacgaacttcctccaagatctataagagagggtctttcaaaagagctgggccttgacaccgagaaggtcagcaaatggttcaaaaatgcacgttacttagcacttaaaaacagaaagcatcaagcagaaggaggagcagatcagcttcagagtatcacttctacaaagaacagattacaaaaacaggagaatgtcgatcctttgaaatcaaagaccccaaaaattactaggacacattcccagaaggatgttaaaaatgtcaatggaagaaagaaaatgaagtcatctaacaagaaaagacaaccagaaattcctccacctccaggagaaaatggcaagaaggactttatggagatcagtgatgatgtgagcttgaagaaactgttgaagaaaagaaagaagaggttgataaattttacgtttggaggagactctcagttggcagagttggaatttgaaagactaagcgaattgaagactaaagtagatagtatgaagcaaaaattaactgcaattcaaaattacagagttaagggttcaccctattcgaatgaaccatccattgtatatgtacccacagctgtgttaagggaaaaggttgaatga

SEQ ID NO: 226 - protein, 580 aa, Glycine max
  UNSURE (87)..(87): Xaa can be any naturally occurring amino acid
KKKRQRNNIDVDDASRLRRRTRYLLIKMKLEQNLIDAYSGEGWKGQSREKIRPEKELLRAKKQILKCKLSIRDAIHQLDSLSSVGSXEDSAIAPDGSVYHENIFCANCKLHEAFPDNDIILCDGTCNRAFHQRCLNPPLDTENIPPGDQGWFCKFCECKIEILEATNAHLGTQFSLDSNWQDVFKEEAAMPDGDIALLNPEEEWPSDDPEDDDYNPERKEDNHNFDTEGADENASNDSTSCSSLLSLNGECPPVDEGICHEYYSVNSCLDSDESGEIACGPRQRKAVDYKKLYDEMYGKDAPPCEQMSEDEDWGPGKRKRREKESDAVDSLMTLHESENRHPNNEHNMTSKDSSSIKIKRHCFRIPRDAVERLRQVFAENELPPRSIREGLSKELGLDTEKVSKWFKNARYLALKNRKHQAEGGADQLQSITSTKNRLQKQENVDPLKSKTPKITRTHSQKDVKNVNGRKKMKSSNKKRQPEIPPPPGENGKKDFMEISDDVSLKKLLKKRKKRLINFTFGGDSQLAELEFERLSELKTKVDSMKQKLTAIQNYRVKGSPYSNEPSIVYVPTAVLREKVE

SEQ ID NO: 227 - DNA, 1614 bp, Lotus corniculatus
atgcagggtactgagaagttaaatggcacaggatctacaaaatccagtaactcagaggaacatgctgagtcaaaggtagattcattgagatacagaacaaatataacaaaatgccgagggaagaaacaaaaactgaaatcaaaatctcataaactcagcggttgcttaagtgcatcagggaggacagttaccaattcttccatcaagagacaagtaaaggattcttctaataaaaagattattagacaaagtctacataaaactgatggcaaatcttcacggatgctgtcttcaacaatgatacaaggaggaaaatcttctcttggttctagaaaggagggcaaagatgttgatggggaggtaatggttcaaaaagttaaaagaaagagaaagaagaaaaggagacaggatgatgttgatcttgatgatgcttcacgcttactgagaagaacaaggtacctcttaatcaaaatgaagctagagcagaatcttattgatgcttactctggagaaggttggaaaggtcaaagtcgagagaagattaggccagaaaaggagctacaaagagccaagaagcagattttgaattgtaaacttagtattcgggatgccattcgccagttagattctcttagctcattgggcagcattgaagattctgtcattgatccagatggatctgtttatcatgaacatatattctgtgcaaattgcaagttgcgtgaagctttcccagataatgatataatactctgtgatggcacatgcaatcgtgcttttcaccaacggtgtctcaaccctcctttggatactgaaaatattcctcctggagaccaaggctggttctgcaatttttgtgaatgtaagatagaaatattggaggcaacaaatgcccatcttgggactcaaatctccttggacagtacttggcaggatgtattcaaggaggaggctgctatacccgatggtgataatgcattactgaatccagaagaagaatggccatcagatgatcctgaagacgatgattattatccagagaggaaagaagacaaccacagcatcaaagcagaaggaactgatgataatgcatccaatgatttaagcagttcttccagtctagggtctttgaatggtgaatgttctccagtagatgaaggcacgggtcttgaatattattctgttaattgctgcatagattctgatgattctggggaaatagcatgtggccgtaggcagcgtaaatctgttgactacaagaaactatatgatgaaatgtttgggaaggatgctcctccatgtgaactagtgagtgaagatgaagactggggtactggcaaaagaaagcgaagagaaaaagagtctgatgctgttaatactctcatgactatgcatgaaagtgagaacaaaaatcccaataatgagaatagtgatggaataagagagggttcttcaggcaaaccaataagaaggtcttgtttcaggattccacatgatgcacttgagaagcttcgccaagtttttgcggagaatgagcttcctccaagatctgtcaaagaaggtctttcgaaagagttgggaattgatgctgcgaaggttatgccttacaacctc

SEQ ID NO: 228 - protein, 538 aa, Lotus corniculatus
MQGTEKLNGTGSTKSSNSEEHAESKVDSLRYRTNITKCRGKKQKLKSKSHKLSGCLSASGRTVTNSSIKRQVKDSSNKKIIRQSLHKTDGKSSRMLSSTMIQGGKSSLGSRKEGKDVDGEVMVQKVKRKRKKKRRQDDVDLDDASRLLRRTRYLLIKMKLEQNLIDAYSGEGWKGQSREKIRPEKELQRAKKQILNCKLSIRDAIRQLDSLSSLGSIEDSVIDPDGSVYHEHIFCANCKLREAFPDNDIILCDGTCNRAFHQRCLNPPLDTENIPPGDQGWFCNFCECKIEILEATNAHLGTQISLDSTWQDVFKEEAAIPDGDNALLNPEEEWPSDDPEDDDYYPERKEDNHSIKAEGTDDNASNDLSSSSSLGSLNGECSPVDEGTGLEYYSVNCCIDSDDSGEIACGRRQRKSVDYKKLYDEMFGKDAPPCELVSEDEDWGTGKRKRREKESDAVNTLMTMHESENKNPNNENSDGIREGSSGKPIRRSCFRIPHDALEKLRQVFAENELPPRSVKEGLSKELGIDAAKVMPYNL

SEQ ID NO: 229 - DNA, 573 bp, Sorghum propinquum
aactcgagaacaaatgaagaaaaatctggtatatcagggaagattgattcagtagacaactcttgcttggttcccttgtctgaaatcatcaatgtgcatacacgagtgcaccacaatcttgagatgaggaagatggaatcaactagcagtcctgtgtggctgcacaatgaaggaggctgcttgtttccaacactccaagccaaggagagtacattacctacaagcaagccttgtttgccgtcagaaataacccatccaacaactaatgaagtgagcactttagtgcaagctacttcttggatggatgctggggcgtgcattgagcagcaagaaaccactccttgggtggataccggggcctcaggttaccagcctttcctggacgtgattgatgagatgtgcggacttgagtgcaggctgcagaggctgaaggagaacatgttctcatctggcatggacggcagaaccgccggtgtgagtgacatgggaaaccaggctgtggtgcttgtgccgactgctgagctcaaggaaaaagcgccgcatggcggtttatttgggcactattgcccatag

SEQ ID NO: 230 - protein, 190 aa, Sorghum propinquum
NSRTNEEKSGISGKIDSVDNSCLVPLSEIINVHTRVHHNLEMRKMESTSSPVWLHNEGGCLFPTLQAKESTLPTSKPCLPSEITHPTTNEVSTLVQATSWMDAGACIEQQETTPWVDTGASGYQPFLDVIDEMCGLECRLQRLKENMFSSGMDGRTAGVSDMGNQAVVLVPTAELKEKAPHGGLFGHYCP

SEQ ID NO: 231 - DNA, 532 bp, Sorghum propinquum
aagataaaattggagcagaatctactagatgcttactctggagatggatggaatgggcaaagccgggagaaaataaagccagagaaggaactgcagcgtgccaggaaacaaatcataaaatgcaaaattgctatacgtgatatcattcgccaactttgtttgtatacttctactgggagtgttgatgacccagcaatgcctccagatcagtttaccaatcccgaacataccatgtgctcaacatgcaagtctcatgaatcatttcccagcaataaatttatcttctgtgaagggccctgcaaaagggcatatcatgagaaatgtttggaacctcccttaaacaaaggtgtacttccaacaagtagccatggatggctttgcaaattctgtttgtgcaaggtgaaaattttagaaactattaatgcacatctaggaacaagttttacagtgatgtgctcctttgaagatatattcaaggaagcaacagaacaaatagactccgaggatgcactagatgaagattggctctctg

SEQ ID NO: 232 - protein, 177 aa, Sorghum propinquum
KIKLEQNLLDAYSGDGWNGQSREKIKPEKELQRARKQIIKCKIAIRDIIRQLCLYTSTGSVDDPAMPPDQFTNPEHTMCSTCKSHESFPSNKFIFCEGPCKRAYHEKCLEPPLNKGVLPTSSHGWLCKFCLCKVKILETINAHLGTSFTVMCSFEDIFKEATEQIDSEDALDEDWLS

SEQ ID NO: 233 - protein, 180 aa, Oryza sativa
DEVSRMEKRARYLLIKIKQEQNLLDAYSGDGWNGHSREKIKPEKELQRAKKQIMKYKIAIRDVIHQLDLCSSSGSKDDSVIPPDGCHESVNPEHTICSRCKSHESFPDNNIIFCEGGCKLACHQKCLEPPFDKILPTTRHGRLCKHCSSKMKILDAINAHLGTSFTVKCPSSDIFKEAAE

SEQ ID NO: 234 - protein, 50 aa, Oryza sativa
RIPPAAVEVLRKAFAENELPARSVKENLSTELGISFEKIDKWFKNTRCAA

SEQ ID NO: 235 - DNA, 2194 bp, Oryza sativa; identical to SEQ ID NO: 10

SEQ ID NO: 236 - DNA, 56 bp, Artificial sequence
  primer: prm09687
ggggacaagtttgtacaaaaaagcaggcttaaacaatgaataccccagaaaagaaa

SEQ ID NO: 237 - DNA, 50 bp, Artificial sequence
  primer: prm09688
ggggaccactttgtacaagaaagctgggtgatgcaaggttaagatgcttt

SEQ ID NO: 238 - DNA, 2649 bp, Physcomitrella patens
atgatgaagaattaccgtcctccatcaccacttccaagtgctcgccaagctttcttacaagacccggcgtcgtcattccaaatgacaggacgacattgggcagacccagagggaggtggagaacggaagcttcacacacactctcactcacactcactcactcacgaaggaaacgaagggcaaaggaaggggagccccgccgtgagccgagagcggagagcaagcattcccaacggaagtctccgtcaatgcggtgccggagccgacgacgacgacgatgatgggctgagcctgtcatcgcaatggatgcattgccctgtaagtgggaaggtggaggaaggattggggaagaggttgaggaagagaaagagaaagagaaagagtttgttgttgttgttggggaaggggagggggcgacggatgatgcccatgggcgtagtccgcgacgatgagtcccaggccgctgctggctcgccgcctgcgcccacccctcccccaatcgccaagccgacgctgcgatcccactcgcgctccagggcgcacaaggcgcgctcccaacacccgccgctgggcgatggcgatgcgcccttgcccccaccgcaaggaacagcaacaccaggaggaggaggagcagcagcagtgggcgcaccaggggccatggatgccgaggctatggcggcggggcagcggcggcgtcgacgacgccgacgacagcggggcaagaactcggatgtgccgcttgacaatcgcacgcgaattaagaggcgtgtcaagtacttgctcatgaaaatgcgagtcgaccagaacctgctggatgcgtactccggggagggttggaaggggcagaggaattctctttttggcatatccagtcgggaaaagatcaggccggagcaagaactacagcgtgctgaagcgcagatcctgcattcgaaattggccatacgggaggctattcatgaattggataacttggggttagaaggctcgctcgacgaaaatgcatttgatgctgaaggccgtgtttaccatgaagagatattttgtgccaagtgccgatctcaagatgctctacctgacaacgacattattttatgtgacggcgcatgcaacagaggcttccatcagtactgtttagacccacctttagctacgatcaacattcctcctggagacgaagggtggttgtgtcctgtatgtgagtgcaagatggagtgcattgaagttattaatgcatacttgggcacacactttgaggtggagaatagttgggaggagttgttttctgaagaagctctcgtggctgcgggcggtagaactcaaggggtcacagatggtgattttccttcctcagactcagaagacgacgattataaccctgaaggagcggagaagcggacagacagtgaaagcgaaggcgaaagtgatgaaggtgggggagatagtgattcaggaagcgattttagggaaaatgaagcgtctggtagtgacaaagatgagcaagatccaatgcaggcaactaatttagagagacttgcgagaacagcaaagcggaccagcaaggaaggaagtggaggtccagaatcttcaggcagtgatgactcagaagtttttcttgttgatgggtttacggatggtggagtcaaattaggtttaagacgtagagactcacaagcagaagaatcagcttcagacgaggaaaccatggttatagcaggaaaaagacatcgaaaagcagtagactacaagagattacatgatgaaatgtttgggaacatggagattgatgtggacgatatcatatccgaagatgaggattggggtccgaaacgccgtcggagaagaaccattcctgatgacccaagcaggtctagacctcctcgagttcgacggagaaaggcgcgaacctcaactggagatgctttaaaagaagttgatgcagatggggtaccatcagatttaccctctgggtcacaaggcgagggagcagccgatactcttgaagctgttagagacaaacgaatgtggaggaagttgcctgattctgctgttgagacgttacgactggctgcggcagtgacgacactgccctcaaaatcccgtaaagaggagttggcgacacagcttggcttgagtttttcacaagtccatggatggtttaaaaatcagcggtatttagctctcagaaatgggttggcgatttcaaagcgaccagcagctgggcggatggcggccactgtaaccatacaatcggaacacgacaacaattcaagtgcctatttaactgagaagttggatgaagtccaaatgcgactttttgaactgaagcaaactttggaagatttcgctaagaattcatctggtttaggcggtggagaatcagataacagttttgaaaatggaggaattggacttcctgcaaatgggaaacggattatctatgtcccagtggctgaggttagagaacggccttctcttttctctgacagctgtccgctttcattattagcagtgttaaattgcgaggtgaattacaagaggaatctacgtatattcatgtgttcatggcctagctgcttagcgtacggggttttgcatgccaactgcccttgtcatattggatcatgtttcgaaggaataggtgggtga

SEQ ID NO: 239 - protein, 882 aa, Physcomitrella patens
MMKNYRPPSPLPSARQAFLQDPASSFQMTGRHWADPEGGGERKLHTHSHSHSLTHEGNEGQRKGSPAVSRERRASIPNGSLRQCGAGADDDDDDGLSLSSQWMHCPVSGKVEEGLGKRLRKRKRKRKSLLLLLGKGRGRRMMPMGVVRDDESQAAAGSPPAPTPPPIAKPTLRSHSRSRAHKARSQHPPLGDGDAPLPPPQGTATPGGGGAAAVGAPGAMDAEAMAAGQRRRRRRRRQRGKNSDVPLDNRTRIKRRVKYLLMKMRVDQNLLDAYSGEGWKGQRNSLFGISSREKIRPEQELQRAEAQILHSKLAIREAIHELDNLGLEGSLDENAFDAEGRVYHEEIFCAKCRSQDALPDNDIILCDGACNRGFHQYCLDPPLATINIPPGDEGWLCPVCECKMECIEVINAYLGTHFEVENSWEELFSEEALVAAGGRTQGVTDGDFPSSDSEDDDYNPEGAEKRTDSESEGESDEGGGDSDSGSDFRENEASGSDKDEQDPMQATNLERLARTAKRTSKEGSGGPESSGSDDSEVFLVDGFTDGGVKLGLRRRDSQAEESASDEETMVIAGKRHRKAVDYKRLHDEMFGNMEIDVDDIISEDEDWGPKRRRRRTIPDDPSRSRPPRVRRRKARTSTGDALKEVDADGVPSDLPSGSQGEGAADTLEAVRDKRMWRKLPDSAVETLRLAAAVTTLPSKSRKEELATQLGLSFSQVHGWFKNQRYLALRNGLAISKRPAAGRMAATVTIQSEHDNNSSAYLTEKLDEVQMRLFELKQTLEDFAKNSSGLGGGESDNSFENGGIGLPANGKRIIYVPVAEVRERPSLFSDSCPLSLLAVLNCEVNYKRNLRIFMCSWPSCLAYGVLHANCPCHIGSCFEGIGG

SEQ ID NO: 240 - DNA, 2379 bp, Physcomitrella patens
atggtgccgacgggcgtggtggagcgggaggaccagcctgagcctgctgctgcccccccagtgccggtgattacacccaagacgcttcgatcgcactctatcaggacgcagaccacgccaggtgatggcgatgctggtgcggatcatgctcctggagcagtggcagcagcagcagcatcagcaggaggaggaggagcagcggatgtcatgcaaggtaacgatgcggggcaggaacggcgaggacgacggcgcgggcgacggaagaagtcagacgtgccgctcgataatcccacgcgaatcctaaagcatgtcaagtacttgctcattaaaatgcgagtccaccagaacctgctcgatgcgtacacaggggagggttggaagggtcagagtcgcgagaagatcaggccggagcaagaactacaacgtgcgaaggcgcagatactgcgatctaagttggccatacgggaggctattcatgaactcgatgacgtgggtttagaaggttctctcgacaaaaacgcttttgattctgaaggtcgtatttaccatgaagagattttttgtgcgaagtgcaaatcccaagaagctcttcctgacaacgacattatcttgtgcgacggggcgtgcaacagaggcttccatcagtattgcttagacccacctttagctacggaagacattcctcctggagatgaaggatggttatgccctgtatgcgactgcaagatggagtgtattgaagcgataaattcatattttggcaccagttttgaggtcgagaatagttgggagagctttttttcgaacgaagctggtatagctgcaggcggtggaacgcaagaaggggctggtggtgattggccttcctcaggcgatgaagatgatgagtatgatccagaaacagcggaagggccttcttcagcttctgaaagtggagctcaagtaatagggcttgctgttgactggccgtcctcagacgacgaagatcacgactatgatccggaagcagcggaagaacctcctggagcttctgggagtggaactcaaacagtaggtcttgacgttgattggccttccacagacgatgaagatgacgactttgatccagaaggtatcagaaagcaggcaaacagtgacgaagaaagtagtagtgatgaaagtgaggaggacggggaggatagtggttctgtaagcggcttcagggaaaatgaggcgtcttcaggtgtaagtgacaaagatgagcaggagcctagtgaaaaacataatctggagctaactgctgtcactaacatcaagaaacttgcaagaaaaggaaaacgtaacataatcagcaacaaaggaaaaagtgaatatttagagtcttcagacagtgatgattctgatgtctctctttttgacgagttcaagggtggtaatgccaatttaggcttaagacgtggggatccacaggcagcagtatcagcagcagacgaggaagccgtgattattgctgggaaaagacatcggaaagctgtggactacaaaagactacatgatgaaatgtatggtaaagcggaggccgataacgatgacgacgttatctctgaggatgaagattggggtcctgaacgtcgccgaagacgaaccattcctgatgatcctaactcgccaaggtcccgaattcgaggtaggaaagtgagaactccaagtggagatatttctaaaggagccgatgcagatttaccctctggattaccagatatgccatcccactttcccactggttcacaaggtgaagtaggctcaccacaagacattccagcactagatggagcagctgacagtcctggaggagaaaagcggatgtggcggcgattgcctgattccgcagtcgaggcattacggtgtattcttgatgttaataggctgccctcaaaatctcggaaggaagaattagcaattaagcttgggttgagcttttcacaggttcatggatggtttaaaaatcagcggcatcaagctctgaggaaagggttggcatgtcctaagcggatacatccagtagcatcaagctcaagagatttcaatactgtcgaatctccatcgtctgtggcgactttaactgaaagcacattaccgcaaaaagagaatgctccaaattctattttaactgagaagttggacgaagttcaggtgcgactcctcgaattgaagcaagcgttggacgattttaccaagaatgcagcagtggttgcggatggcggaagtattgaattggataacaacgtggaaaacggaggaattggacttcctgaaaatggaaaacgtgttgtctatgtgccagttgtggccgacgttagggaacaatcaccaatgagtacgcatactagcgcatgttga

SEQ ID NO: 241 - protein, 792 aa, Physcomitrella patens
MVPTGVVEREDQPEPAAAPPVPVITPKTLRSHSIRTQTTPGDGDAGADHAPGAVAAAAASAGGGGAADVMQGNDAGQERRGRRRGRRKKSDVPLDNPTRILKHVKYLLIKMRVHQNLLDAYTGEGWKGQSREKIRPEQELQRAKAQILRSKLAIREAIHELDDVGLEGSLDKNAFDSEGRIYHEEIFCAKCKSQEALPDNDIILCDGACNRGFHQYCLDPPLATEDIPPGDEGWLCPVCDCKMECIEAINSYFGTSFEVENSWESFFSNEAGIAAGGGTQEGAGGDWPSSGDEDDEYDPETAEGPSSASESGAQVIGLAVDWPSSDDEDHDYDPEAAEEPPGASGSGTQTVGLDVDWPSTDDEDDDFDPEGIRKQANSDEESSSDESEEDGEDSGSVSGFRENEASSGVSDKDEQEPSEKHNLELTAVTNIKKLARKGKRNIISNKGKSEYLESSDSDDSDVSLFDEFKGGNANLGLRRGDPQAAVSAADEEAVIIAGKRHRKAVDYKRLHDEMYGKAEADNDDDVISEDEDWGPERRRRRTIPDDPNSPRSRIRGRKVRTPSGDISKGADADLPSGLPDMPSHFPTGSQGEVGSPQDIPALDGAADSPGGEKRMWRRLPDSAVEALRCILDVNRLPSKSRKEELAIKLGLSFSQVHGWFKNQRHQALRKGLACPKRIHPVASSSRDFNTVESPSSVATLTESTLPQKENAPNSILTEKLDEVQVRLLELKQALDDFTKNAAVVADGGSIELDNNVENGGIGLPENGKRVVYVPVVADVREQSPMSTHTSAC

SEQ ID NO: 242 - DNA, 2166 bp, Zea mays
atgcattcttcggaaaataaactgggttggaatgagacctctatggggttggttcctgtaccaaaaagaccagctagacctgatgcttcccaccaatgcaaatctgattcctttatgaagcgatcaccaaggaaagttagaaatgctactctggcaaaaagcataaagagcaaataccactatagtcccctcaaacagcggaagggttcagattctgttcctgggaaaatcgtaacaggactaaccgcaaggaaaaagaagaaaaggaaaatccaaattacagacgaggcaactcgtttggaacgaagagcgagatattttctaatcaagataaaactggagcagaatttgctagatgcttactctggagatggatggaatgggcaaagccgagagaaaataaagccagagaaggaactgcaacgtgccaggaaacaaatcataaaatgcaaaattgctatacgtgatatcatccgccaacttgatttgtatacttctactgggagtgttgatgacccactaatgcctacagatcagtccaccaatcccgaacataccatgtgctcaacatgcaagtctcatgaatcatttcccagcaataaaattatcttctgcaaagggccctgcaaaagggcatgtcatgagaaatgtttggaacctcccttaaacaaaagcgtacttccaacaagtagccatgggtggctttgcaaattctgtttgtgcaaggtgaggattttagaaactattaatgcacatctagggacgagttttacagtgaagtgccactttgaagatatattcaaggaaactactgaactaatagactctgaggatgcactagatgaagattggctttctgagtattcaggtgatgaggactatgatcctgatgaaaatgaggccagtggcgactgtatggacagcggggagaagattatgtctgatgattccaatggttcaggaagccccctttattctccaaatgacgatattcctgacttcatatcagcagacttaaatgttgtggaagggttttgtcataccaatttagatttaggcattgatgccgttgaagatgattttgcacagatcctcacctaccaaaggccaagaagagatgttgattatagaaggcttaacgaggaaatgtttgggaaaataaccgggaatgaagaacagagcgaggacgaagattggggccatgaaaggagaaagaaaaggacgcattcaggtgttgctggggataattctgttggtttcttgaacgttatatctgatgaaaagagccagaagaaggggagaaaacttttcaggattcctcctgcagctgttgaggtacttcgcagagcttttgctgaaaatgagcttccaccccgggatgttaaagaaaatctctcaagagaattgggaatttcttttgaaaagattgataaatggttcaaaaatacacggtgtgctgctctcagagatcggaaggctgaaggaaacagtcataatacagctcccagcaaaatctcaaaaaataaaggaaaagctggaatctcaggcaaggctggaaggaatggtcatgttactggtccctgcaataatttgagaataaatgaagaaaaaacaggtatatcggggaagtttgattcaggagacaactcttgtttggttcccttctctgaagtcatcaatgtgcctacgcgattgccacacaactttgagatgaggaagatggaatcaactagaagtcctgcgaggctacacaataaaggagggtgcctgtctgcaacaatccaaattaaggagagtacattgttacccacaggcaagccttgttggcagtcagaaatgagccatccaacaactaatgaagtgagcacttcagcgcaagctactacttggatcgacgcgggggcgtgtgccgaggagcaagaacctactccttgggtggacatcggggcctcagactaccagcctttcctggatgtgatcgacgacatgtgcggacttgagtggaggctgcagagactgaaggagaacatgctctcatctagcatagacggccaaaccgccgccagtgagagtgacaaaagaaaccagaccgtggtgctcgtgccaactgccgagctcaaggaaaaactgccgcatgacggtttattcgggcattattgcccatag

SEQ ID NO: 243 - protein, 721 aa, Zea mays
MHSSENKLGWNETSMGLVPVPKRPARPDASHQCKSDSFMKRSPRKVRNATLAKSIKSKYHYSPLKQRKGSDSVPGKIVTGLTARKKKKRKIQITDEATRLERRARYFLIKIKLEQNLLDAYSGDGWNGQSREKIKPEKELQRARKQIIKCKIAIRDIIRQLDLYTSTGSVDDPLMPTDQSTNPEHTMCSTCKSHESFPSNKIIFCKGPCKRACHEKCLEPPLNKSVLPTSSHGWLCKFCLCKVRILETINAHLGTSFTVKCHFEDIFKETTELIDSEDALDEDWLSEYSGDEDYDPDENEASGDCMDSGEKIMSDDSNGSGSPLYSPNDDIPDFISADLNVVEGFCHTNLDLGIDAVEDDFAQILTYQRPRRDVDYRRLNEEMFGKITGNEEQSEDEDWGHERRKKRTHSGVAGDNSVGFLNVISDEKSQKKGRKLFRIPPAAVEVLRRAFAENELPPRDVKENLSRELGISFEKIDKWFKNTRCAALRDRKAEGNSHNTAPSKISKNKGKAGISGKAGRNGHVTGPCNNLRINEEKTGISGKFDSGDNSCLVPFSEVINVPTRLPHNFEMRKMESTRSPARLHNKGGCLSATIQIKESTLLPTGKPCWQSEMSHPTTNEVSTSAQATTWIDAGACAEEQEPTPWVDIGASDYQPFLDVIDDMCGLEWRLQRLKENMLSSSIDGQTAASESDKRNQTVVLVPTAELKEKLPHDGLFGHYCP

SEQ ID NO: 244 - DNA, 846 bp, Triticum aestivum
atggcggggcagccgccgcagggcccggaggacgacttcctcgaccagttcttctccctcaccaactccctctccgccgccggccgcccctccggcgaccagcccttctccctcgccctcagcctcgacgccgcctcggacgcctccggcagcaggggcggcatcggcgacgacgccggcaacgccgcggagcgggacggcgtgcagctccccggcctcttcccgccggtgttcggcggtggcctccagccgccgcaccttcgccccagccaccctcccccacagatgttccacgcgcagcagccgaagcagggcgggccggctggagggccgcagccgccggcgccgaggccgaaggtgcgggcgcgtcgcggtcaggcgactgatccccacagcatcgcggagaggctaagaagagagaggatagcggaaaggatgagggccctacaggaattggtccccaatacgaacaagacagatagggcagttatgctagatgagatcctggattatgtgaagttccttaggcttcaagtaaaggtgttaagcatgagcagattgggtggtgctggtgctgttgcacagctggtttctgacattccactttcagttaagggggaagcaagcgatggtgggagcaaacagcagatatgggaaaagtggtcaacggatggcacggaaaaacaggttgcgaagctgatggacgaggacatcggtgccgcaatgcaatttctccaatcaaaggctctctgcatgatgccagtctcccttgccatggctatctatgacacacaacattcacaggacggccaaccagtgaagcctgaacccaacaacactgcctag

SEQ ID NO: 245 - protein, 281 aa, Triticum aestivum
MAGQPPQGPEDDFLDQFFSLTNSLSAAGRPSGDQPFSLALSLDAASDASGSRGGIGDDAGNAAERDGVQLPGLFPPVFGGGLQPPHLRPSHPPPQMFHAQQPKQGGPAGGPQPPAPRPKVRARRGQATDPHSIAERLRRERIAERMRALQELVPNTNKTDRAVMLDEILDYVKFLRLQVKVLSMSRLGGAGAVAQLVSDIPLSVKGEASDGGSKQQIWEKWSTDGTEKQVAKLMDEDIGAAMQFLQSKALCMMPVSLAMAIYDTQHSQDGQPVKPEPNNTA

SEQ ID NO: 246 - protein, 6 aa, Artificial sequence
  motif 1
  VARIANT (1)..(1): /replace = "Asp"
  VARIANT (2)..(2): /replace = "Ser" /replace = "Glu"
  VARIANT (3)..(3): /replace = "Met"
  VARIANT (4)..(4): /replace = "Phe"
  VARIANT (5)..(5): /replace = "Glu" /replace = "Gln" /replace = "Leu"
  VARIANT (6)..(6): /replace = "His" /replace = "Glu"
EDFLDQ

SEQ ID NO: 247 - protein, 16 aa, Artificial sequence
  motif 2
  VARIANT (3)..(3): /replace = "Ile" /replace = "Gln"
  VARIANT (6)..(6): /replace = "His"
RARRGQATDPHSIAER

SEQ ID NO: 248 - protein, 9 aa, Artificial sequence
  motif 3
  VARIANT (1)..(1): /replace = "Ile" /replace = "Val" /replace = "Leu"
  VARIANT (2)..(2): /replace = "Arg"
  VARIANT (3)..(3): /replace = "Ser" /replace = "Gln" /replace = "Asp" /replace = "Asn"
  VARIANT (6)..(6): /replace = "Asp" /replace = "Val"
MKALQELVP

SEQ ID NO: 249 - protein, 17 aa, Artificial sequence
  motif 4
  VARIANT (1)..(1): /replace = "Ile"
  VARIANT (2)..(2): /replace = "Ile"
  VARIANT (6)..(6): /replace = "Val" /replace = "Leu"
  VARIANT (7)..(7): /replace = "Glu" /replace = "Gly"
  VARIANT (9)..(9): /replace = "Leu" /replace = "Ile"
  VARIANT (10)..(10): /replace = "Arg"
  VARIANT (13)..(13): /replace = "Arg"
  VARIANT (16)..(16): /replace = "Ile"
MLDEIIDYVKFLQLQVK

SEQ ID NO: 250 - protein, 8 aa, Artificial sequence
  motif 5
  VARIANT (1)..(1): /replace = "Ile"
  VARIANT (7)..(7): /replace = "Val"
VLSMSRLG

SEQ ID NO: 251 - protein, 16 aa, Artificial sequence
  motif 6
  VARIANT (2)..(2): /replace = "Val" /replace = "Leu" /replace = "Ile"
  VARIANT (3)..(3): /replace = "Arg"
  VARIANT (4)..(4): /replace = "Met"
  VARIANT (5)..(5): /replace = "Leu"
  VARIANT (6)..(6): /replace = "Asp"
  VARIANT (7)..(7): /replace = "Asp" /replace = "Ser" /replace = "Lys" /replace = "Thr"
  VARIANT (8)..(8): /replace = "Asn" /replace = "Ser"
  VARIANT (9)..(9): /replace = "Val" /replace = "Ile"
  VARIANT (10)..(10): /replace = "Val" /replace = "Ile"
  UNSURE (11)..(11): Xaa is an unknown amino acid
  VARIANT (15)..(15): /replace = "Leu" /replace = "Phe"
VAKLMEEDMGXAMQYL

SEQ ID NO: 252 - protein, 6 aa, Artificial sequence
  motif 7
  VARIANT (1)..(1): /replace = "Val"
  VARIANT (2)..(2): /replace = "Ser"
  VARIANT (3)..(3): /replace = "Val"
  VARIANT (4)..(4): /replace = "Thr" /replace = "Ala"
MPISLA

SEQ ID NO: 253 - protein, 51 aa, Artificial sequence
  motif 8
SIAERLRRERIAERMRALQELVPNTNKTDRAVMLDEILDYVKFLRLQVKVL

SEQ ID NO: 254 - DNA, 50 bp, Artificial sequence
  primer: prm009718
  misc_feature (47)..(47): n is a, c, g, or t
ggggacaagtttgtacaaaaaagcaggcttaaacaatggcggggcanccg

SEQ ID NO: 255 - DNA, 50 bp, Artificial sequence
  primer: prm009719
ggggaccactttgtacaagaaagctgggtatgggtgttgcagctgctgtt

SEQ ID NO: 256 - DNA, 2194 bp, Oryza sativa; identical to SEQ ID NO: 10

SEQ ID NO: 257 - DNA, 3093 bp, Artificial sequence
  expression cassette
aatccgaaaagtttctgcaccgttttcaccccctaactaacaatatagggaacgtgtgctaaatataaaatgagaccttatatatgtagcgctgataactagaactatgcaagaaaaactcatccacctactttagtggcaatcgggctaaataaaaaagagtcgctacactagtttcgttttccttagtaattaagtgggaaaatgaaatcattattgcttagaatatacgttcacatctctgtcatgaagttaaattattcgaggtagccataattgtcatcaaactcttcttgaataaaaaaatctttctagctgaactcaatgggtaaagagagagattttttttaaaaaaatagaatgaagatattctgaacgtattggcaaagatttaaacatataattatataattttatagtttgtgcattcgtcatatcgcacatcattaaggacatgtcttactccatcccaatttttatttagtaattaaagacaattgacttatttttattatttatcttttttcgattagatgcaaggtacttacgcacacactttgtgctcatgtgcatgtgtgagtgcacctcctcaatacacgttcaactagcaacacatctctaatatcactcgcctatttaatacatttaggtagcaatatctgaattcaagcactccaccatcaccagaccacttttaataatatctaaaatacaaaaaataattttacagaatagcatgaaaagtatgaaacgaactatttaggtttttcacatacaaaaaaaaaaagaattttgctcgtgcgcgagcgccaatctcccatattgggcacacaggcaacaacagagtggctgcccacagaacaacccacaaaaaacgatgatctaacggaggacagcaagtccgcaacaaccttttaacagcaggctttgcggccaggagagaggaggagaggcaaagaaaaccaagcatcctccttctcccatctataaattcctccccccttttcccctctctatataggaggcatccaagccaagaagagggagagcaccaaggacacgcgactagcagaagccgagcgaccgccttctcgatccatatcttccggtcgagttcttggtcgatctcttccctcctccacctcctcctcacagggtatgtgcctcccttcggttgttcttggatttattgttctaggttgtgtagtacgggcgttgatgttaggaaaggggatctgtatctgtgatgattcctgttcttggatttgggatagaggggttcttgatgttgcatgttatcggttcggtttgattagtagtatggttttcaatcgtctggagagctctatggaaatgaaatggtttagggatcggaatcttgcgattttgtgagtaccttttgtttgaggtaaaatcagagcaccggtgattttgcttggtgtaataaagtacggttgtttggtcctcgattctggtagtgatgcttctcgatttgacgaagctatcctttgtttattccctattgaacaaaaataatccaactttgaagacggtcccgttgatgagattgaatgattgattcttaagcctgtccaaaatttcgcagctggcttgtttagatacagtagtccccatcacgaaattcatggaaacagttataatcctcaggaacaggggattccctgttcttccgatttgctttagtcccagaattttttttcccaaatatcttaaaaagtcactttctggttcagttcaatgaattgattgctacaaataatgcttttatagcgttatcctagctgtagttcagttaataggtaatacccctatagtttagtcaggagaagaacttatccgatttctgatctccatttttaattatatgaaatgaactgtagcataagcagtattcatttggattattttttttattagctctcaccccttcattattctgagctgaaagtctggcatgaactgtcctcaattttgttttcaaattcacatcgattatctatgcattatcctcttgtatctacctgtagaagtttctttttggttattccttgactgcttgattacagaaagaaatttatgaagctgtaatcgggatagttatactgcttgttcttatgattcatttcctttgtgcagttcttggtgtagcttgccactttcaccagcaaagttcatttaaatcaactagggatatcacaagtttgtacaaaaaagcaggcttaaacaatggcggggcagccgccgcagggcccggaggacgacttcctcgaccagttcttctccctcaccaactccctctccgccgccggccgcccctccggcgaccagcccttctccctcgccctcagcctcgacgccgcctcggacgcctccggcagcaggggcggcatcggcgacgacgccggcaacgccgcggagcgggacggcgtgcagctccccggcctcttcccgccggtgttcggcggtggcctccagccgccgcaccttcgccccagccaccctcccccacagatgttccacgcgcagcagccgaagcagggcgggccggctggagggccgcagccgccggcgccgaggccgaaggtgcgggcgcgtcgcggtcaggcgactgatccccacagcatcgcggagaggctaagaagagagaggatagcggaaaggatgagggccctacaggaattggtccccaatacgaacaagacagatagggcagttatgctagatgagatcctggattatgtgaagttccttaggcttcaagtaaaggtgttaagcatgagcagattgggtggtgctggtgctgttgcacagctggtttctgacattccactttcagttaagggggaagcaagcgatggtgggagcaaacagcagatatgggaaaagtggtcaacggatggcacggaaaaacaggttgcgaagctgatggacgaggacatcggtgccgcaatgcaatttctccaatcaaaggctctctgcatgatgccagtctcccttgccatggctatctatgacacacaacattcacaggacggccaaccagtgaagcctgaacccaacaacactgcctag

SEQ ID NO: 258 - protein, 285 aa, Allium cepa
MASNNNPQPPSDGLNDDFFDQIFSMPSAFAASSASTDATEALNYADSSTTGVTPMFSLGLSLDQQPKSDSSQSEREHPVQFACLFPQYGHNNQVHQTRPNLSPPQVLHGQAMQSSMAATPQPTGPRPRVRARRGQATDPHSIAERLRRERIAERIRALQELVPSTNKTDRAVMLDEIVEYVKFLRLQVKVLSMSRLGGAGAVAQLVADIPMSSSVEGDSSESGKTSYQGWEKWSTDGTERQVAKLMEEDVGAAMQFLQSKALCIMPISLAAAICQTNPSTEISFM

SEQ ID NO: 259 - protein, 302 aa, Arabidopsis thaliana
MANNNNIPHDSISDPSPTDDFFEQILGLSNFSGSSGSGLSGIGGVGPPPMMLQLGSGNEGNHNHMGAIGGGGPVGFHNQMFPLGLSLDQGKGHGFLKPDETGKRFQDDVLDNRCSSMKPIFHGQPMSQPAPPMPHQQSTIRPRVRARRGQATDPHSIAERLRRERIAERIRSLQELVPTVNKTDRAAMIDEIVDYVKFLRLQVKVLSMSRLGGAGAVAPLVTEMPLSSSVEDETQAVWEKWSNDGTERQVAKLMEENVGAAMQLLQSKALCIMPISLAMAIYHSQPPDTSSSIVKPEMNPPP

SEQ ID NO: 260 - protein, 310 aa, Arabidopsis thaliana
MASNNPHDNLSDQTPSDDFFEQILGLPNFSASSAAGLSGVDGGLGGGAPPMMLQLGSGEEGSHMGGLGGSGPTGFHNQMFPLGLSLDQGKGPGFLRPEGGHGSGKRFSDDVVDNRCSSMKPVFHGQPMQQPPPSAPHQPTSIRPRVRARRGQATDPHSIAERLRRERIAERIRALQELVPTVNKTDRAAMIDEIVDYVKFLRLQVKVLSMSRLGGAGAVAPLVTDMPLSSSVEDETGEGGRTPQPAWEKWSNDGTERQVAKLMEENVGAAMQLLQSKALCMMPISLAMAIYHSQPPDTSSVVKPENNPPQ

SEQ ID NO: 261 - protein, 831 aa, Arabidopsis thaliana
MMNSSLLTPSSSSSSHIQTPSTTFDHEDFLDQIFSSAPWPSVVDDAHPLPSDGFHGHDVDSRNQPIMMMPLNDGSSVHALYNGFSVAGSLPNFQIPQGSGGGLMNQQGQTQTQTQPQASASTATGGTVAAPPQSRTKIRARRGQATDPHSIAERLRRERIAERMKALQELVPNGNKTDKASMLDEIIDYVKFLQLQVKVLSMSRLGGAASVSSQISEAGGSHGNASSAMVGGSQTAGNSNDSVTMTEHQVAKLMEEDMGSAMQYLQGKGLCLMPISLATAISTATCHSRNPLIPGAVADVGGPSPPNLSGMTIQSTSTKMGSGNGKLNGNGVTERSSSIAVKEAVSVSKAATGMQFDESDARVWIWFEIRREDDIVELLWQSGQVVGTNQTHRQSYDPPPILRGSGSGRGEENAPLSQPPPHLHQQNLFIQEGEMYSWLHHSYRQNYFCSELLNSTPATHPQSSISLAPRQTIATRRAENFMNFSWLRGNIFTGGRVDEAGPSFSVVRESMQVGSNTTPPSSSATESCVIPATEGTASRVSGTLAAHDLGRKGKAVAVEAAGTPSSGVCKAETEPVQIQPATESKLKAREETHGTEEARGSTSRKRSRTAEMHNLAERRRREKINEKMKTLQQLIPRCNKVESDSVSTLISLLKFQRWMMLSSTSNRYRAKYKYALQNRMCFKPMVQHGKSSYVSSFVEMMSTGQGMMSPMMNAGNTQQFMPHMAMDMNRPPPFIPFPGTSFPMPAQMAGVGPSYPAPRYPFPNIQTFDPSRVRLPSPQPNPVSNQPQFPAYMNPYSQFAGPHQLQQPPPPPFQVTLYHGIHCVVAGNPYV

SEQ ID NO: 262 - protein, 310 aa, Arabidopsis thaliana
MNSSSLLTPSSSPSPHLQSPATFDHDDFLHHIFSSTPWPSSVLDDTPPPTSDCAPVTGFHHHDADSRNQITMIPLSHNHPNDALFNGFSTGSLPFHLPQGSGGQTQTQSQATASATTGGATAQPQTKPKVRARRGQATDPHSIAERLRRERIAERMKSLQELVPNGNKTDKASMLDEIIDYVKFLQLQVKVLSMSRLGGAASASSQISEDAGGSHENTSSSGEAKMTEHQVAKLMEEDMGSAMQYLQGKGLCLMPISLATTISTATCPSRSPFVKDTGVPLSPNLSTTIVANGNGSSLVTVKDAPSVSKP

SEQ ID NO: 263 - protein, 297 aa, Arabidopsis thaliana
MENGNGEGKGEFINQNNDFFLDSMSMLSSLPPCWDPSLPPPPPPPQSLFHALAVDAPFPDQFHHPQESGGPTMGSQEGLQPQGTVSTTSAPVVRQKPRVRARRGQATDPHSIAERLRRERIAERMKSLQELVPNTNKTDKASMLDEIIEYVRFLQLQVKVLSMSRLGGAGSVGPRLNGLSAEAGGRLNALTAPCNGLNGNGNATGSSNESLRSTEQRVAKLMEEDMGSAMQYLQGKGLCLMPISLATAISSSTTHSRGSLFNPISSAVAAEDSNVTATAVAAPEASSTMDDVSASKA

SEQ ID NO: 264 - protein, 351 aa, Aquilegia vulgaris
MANNNNPTEGLTDDFLDQILSYGAHEGNLAGNDVNLAGTTTPGGSMALQLSSSGGDITGSGGYHHHHQHQHHHQLSGGGGGFPLGLSLEQSGKGGFFKPDEASGSGKRFRDDFVDLKAVSSTNNDNNDRGDSVHLNNLFPAFGHVQQQQQAHSVRPPSHQNQINQPFLGHPTPGAVAVVPHPPAIRPRVRARRGQATDPHSIAERLRRERIAERMKALQELVPSSNKTDRAAMLDEIVDYVKFLRLQVKVLSMSRLGGAGAVAQLVADIPLSSAEGGASEGGSNQPAWEKWSTDGTEHQVAKLMEEDVGAAMQFLQSKALCIMPISLASAIYHDQPPDASTMIKPEPNAPS

SEQ ID NO: 265 - protein, 205 aa, Aquilegia vulgaris
MKNLQELVPNSNKTDKASMLDEIIEYVRFLQLQVKVLSMSRLGATGAVVPLITENQPEGSTSHFLSQSAGRDVKHIESPNTLTFEQEVVKLMESNMTKAMQFLQRKGLCLMPIALAAAISGSKAPPASLSTEGKKSILTNGFVHHNSGQSNIGPGQISSDGETRSEENIIGIHSREDFSSNSCSGTSIKKEGTNTTNFTREMNQE

SEQ ID NO: 266 - protein, 278 aa, Brassica napus
HASETPSDDFFEQILGLPNFSASSSDGGLGGGGAPPMMLQLGSGEEGGHMGGLGGGSGFHNQMFPLGLSLEQGKGQGFLRPEGGSLGTGKRFSDDVMKPVFHGQPMQQQPAPAAPHQPTSIRPRVRARRGQATDPHSIAERLRRERIAERIRALQELVPTVNKTDRAAMIDEIVDYVKFLRLQVKVLSMSRLGGAGAGAPLVTDMPLSSSVEDESGEGGRAPQPAWEKWSNDGTERQVAKLMEENVGAAMQLLSSKALCMMPISLAMAIYHSQPPDTT

SEQ ID NO: 267 - protein, 345 aa, Citrus clementina
MFLQLGSGGPSPGAGGGATSAADIRSLAMGISMGMMPLGLNLEHSFLRQHEDHNSNHNNNNNTNASSSSPNNSSATSGINERDSVHMPSLFPAFGQLQSQSARPPLPRPPQVQQFQSQPAAAPQPPAVRPRVRARRGQATDPHSIAERLRRERIADRMRALQELVPSCNKTDRAAMLDEIVDYVKFLRLQVKVLSMSRLGAAGAVAQLVADVPLSSALEGESIDGGSSQPEWEKWSNDGTEQQVAKLMEEDIGAAMQFLQSKALCIMPISLASAIYRTRQPDAPAFVKPESSTPSYCLNNNWSQQLAHNDSKYLITGTYSYRILLVLLSNQIIQIPMQRSHSSFP

SEQ ID NO: 268 - protein, 410 aa, Curcuma longa
MQPSSKETERMAQSHAALQLELQNGGGGAQNDDFFEQTMSGFSTAAWAPELGTPRSLFGARSSEESPDDEGLNYAPPYGGSSLLASRHRMHLGTSPADSSMFLQLGGQILLHPTAGASGGESGGFLRLPLSLGSGGSGVSTSAIFGDRSRGEIDPPFESSNPTEAEVLYNDGFTGSLPRAVQASLHQQLLRQPQNYGAATLTGQALAITATASGTAGAGTAPPKPRVRARRGQATDPHSIAERLRRERIAERMKALQELVPNANKTDKASMLDEIIDYLKFLQLQVKVLSMSRLGGAAAVAPLVADMSSESGGGAGTPRSNNDGLTAAEQQVAKLLEEDMGSAMQYLQGKGLCLMPISLASAISSATCRPRPPPGVNLRYPAAGDAPPSPSISALTVQSSNAGSAGADAS

SEQ ID NO: 269 - protein, 281 aa, Citrus paradisi hybrid
MANNPNEASSTDDFLEQILGIPNFGSAESGLAASDGGLAAGSPMMLQLSSGDGSSHISALGGGVSSGYHGQVFPLGLSLEQGKGGFLKPEEASGSGKRFPEEHAIKNVFHGQPLPSPVPAAPHPPAMRPRVRARRGQATDPHSIAERLRRERIAERIRALQELVPSVNKTDRAAMLDEIVDYVKFLRLQVKVLSMSRVGAPGAVAPLVTTDLPLSSVEDESGEGVRNQPAWEKWSNDGTERQVAKLMEENVGAAMQFLQSKALCIMPISLATAIYHSQPPE

SEQ ID NO: 270 - protein, 469 aa, Citrus sinesis
MQPCSSGGEMQGISSLLSNGSHEQQSQIHQSATFDPTSQDDFLEQMLSSLPSCSWTDLKSPWGVVDLNPNNNNNNINNKQPRDLSDETAPSTTQENNVPAGFQFDESMILASKMRQHQISGNTGSGNNNSAAAKFMMQQQQQQIMMAAARGGIGLPLSLGNGGDNDIVDVSSFKSQQGGDGSVQALYNGFTGSLHGSTQPQHFHHLQGGSMPGQTFGAPGPVMNQTQAQASGSTGGGGGGGNTPAQQPKQRVRARRGQATDPHSIAERLRRERIAERMKALQELVPNANKTDKASMLDEIIDYVKFLQLQVKVLSMSRLGGAAAVAPLVADMSSEGGGGDCIQANGRNPNGAQTTSANDSLTVTEHQVAKLMEEDMGSAMQYLQGKGLCLMPISLATAISTATCHSRNPIISTSNNNNNNGNPHHNPLLQSNGEGPTSPSMSVLTVQSATMGNGGADGSVKDAASVSKP

SEQ ID NO: 271 - protein, 320 aa, Eucalyptus grandis
MAGSNPQEGLGDEFFEQILAVPPGAYSGGSTPMVLQLGSGRGGVEDGGGRGGGGGLRGMGVMMPLGLNLEQGGLFRHEDVENSTSASSTTSAINMEREAGVHHGNNMTSCLFPAFGQFQTHQSVQPPPPHPPPPQLHPAFLNQPAVGSPNQPAIRPRARARRGQATDPHSIAERLRRERINERMKALQELVPSCNKTDRAAMLDEIVDYVKFLRLQVKVLSMSRLGGAGAVAQLVADVPLSSAEGEIIEGGNNQPAWEKWLTDGTEQQVAKLMEEDVGAAMQFLQSKTLCIMPISLASAIFRTSQPDMPRSIKPESSAPS

SEQ ID NO: 272 - protein, 346 aa, Eucalyptus grandis
MANNPSDGASDEFLEHLLGLPNFAAAAEAGLAPGDGTGLSVTAATPMMLQLGSGDGSGGHGHGHGHGHGQGHLSALGGGGAGAGGGGGGGGGGYHGAVFPLGLSLEQGKGGFLKPEEASGSGKRYPEEVVDGRASTVKNLHSPLPNFPDVSQMASFRNRDVFHGQPVPNPVPAAPHPPAMRPRVRARRGQATDPHSIAERLRRERIAERIRQLQDLVPSVNKTDRAAMLDEIVDYVKFLRLQVKVLSMSRLGAAGAVAPLVTDIPLSSVEEEGGEGGRNQPAWEKWSNDGTERQVAKLMEENVGAAMQFLQSKALCIMPISLATAIYQTQPPDTSSLVKSESNPPS

SEQ ID NO: 273 - protein, 265 aa, Gossypium hirsutum
DSGGGGFRGIGMMPLGLNLEHGFLRHEDGVVVDNNNNNASCSAASAVSGISERDSMHMVSLFPPFGQMQTQQIRASPPPPQPPPQLHQPFHSQPTSGPVAAAPHPPAVRPRVRARRGQATDPHSIAERLRRERIAERMKALQELVPSCNKTDRAAMLDEIVDYVKFLRLQVKVLSMSRLGAAGAVAQLVADVPLLSVEGDGAGGGTQPPWEKWSNDGTEQQVAKLMEEDIGAAMQFLQSQALCIVPISLASAIFPAHQPDAPTIV

SEQ ID NO: 274 - protein, 306 aa, Gossypium hirsutum
MISNGGESSEFRRSFTGLETLSPIPQLWHLQPYDSVSSLPTLVGQTIVDDEGNINRFIEIDEILQPENLSASINSKGQQDMQNSFCSSFPADHPITKTMIGLPSLVQGASPNLNNGSDRTVKPRVRARRGQATDPHSIAERLRREKIAERMKNLQELVPNSNKTDKASILDEIIGYVKFLQLQVKVLSMSRLGAAAAVVPLITDGRAEVSNGLSLAPLAGQGVDFSPSPDQVVFEQEVVKLMESNMTMAMQYLQSKGFCLMPVALAAAISNVKSSTSSSSSSVPASDESKKLGLHQQYSNQQHLQQ

SEQ ID NO: 275 - protein, 303 aa, Gossypium hirsutum
MANNPNESPADDFLEQILGLSHFAPTETGLAGPDGRLSGNATTAGAPMLLQLSSGGGTGHIGAIGGGGGGAFHGQVFPLGLSLEQGKGGFLKPEEASGSSKRFRNEVVDGRAFSVKNVFHGQPVPATVAAGPHPPAMHPRVRARRGQATDPHSIAERLRRERIAERIRALQELVPSVNKTDRAAMLDEIVDYVKFLRLQVKVLSMSRLGAAGAVAPLVTDLPLSSVEDESGEGGRSQPAWEKWSNDGTERQVAKLMEEDVGAAMQFLQSKALCVMPISLATAIYHTQSPDTSSVVKPETNPPS

SEQ ID NO: 276 - protein, 304 aa, Gossypium hirsutum
MANNTNEAPAADDFLEQILGLPNFAPSETGLAGSDAGLAATAAGAGAPMFLQLSSGDGAAHIGGIGGGGGGAFHGQVFPLGLSLEQGKGGFLKPEEASGSGKRFRNGVVDDRASSVKNVFHGQPMQATVSAAPHPPTMRPRVRARRGQATDPHSIAERLRRERITERIRALQELVPSVNKTDRAVMLDEIVDYVKFLRLQVKVLSMSRLGGAGAVAPLVTDIPLSSVEYESGEGGRSQPAWEKWSNDGTEQQVAKLMEENVGAAMQFLQSKSLCIMPISLATAIYHTQVPDTSSVVKPETNPPA

SEQ ID NO: 277 - protein, 305 aa, Gossypium hirsutum
MANNPNEASADDFLEQILGFPNFAPSETGLAGPDGGLTGTTAGAGTPMFLQLSSGDGASHLGGIGGGGGGAFPGQVFPLGLSLDQGKSGGFLKPEEGSGGSSRRFRDEVVDGRASSVKNVFHGSPMPATVAPSPHPPTMRPRVRARRGQATDPHSIAERLRRERIAERIRALQELVPSVNKTDRAVMLDEIVDYVKFLRLQVKVLSMSRLGGAGAVAPLVTDIPLSSVEDESGDGGRNQPAWEKWSNDGTERQVAKLMEENVGAAMQFLKSKALCIMPISLATAIYHSQPLDTSSIVKPETDPPP

SEQ ID NO: 278 - protein, 427 aa, Gossypium hirsutum
MQPCSREMQAMNSLLNPTQQIPLQDLQINGNRHHHQQIHVPSSSQFQYPTPTSTTHHDDSFLEQILSSTTSFPWSDETGPPNPEDNNNAGFNYDEMVLASKLRQHQINGGAAGNPFAAMKMMLMMQQQQQQQQMMLAGRPTVASAAAGGGITTNHQGGEGSMQALYNVFGDGSLHGTMQAKSFVGANSATEMTQSQGSGPTAGEAVTAPEKPKQRVRARRGQATDPHSIAERLRRVRIAERMKALQELVPNANKTDKASMLDEIIDYVKFLQLQVKVLSMSRLGGAAAVAPLVSEGGGDCIQTSANGGSHPRNSNGDQTPSANDRLTMTEHQVAKLMEEDMGSAMQYLQEKGLCLMPISLATAISSATSRSRNPMINHENPANGSHLLIQSSGGDGPSSPSMSVLTVQSATMGNGGLEGGAASVSKP

SEQ ID NO: 279 - protein, 210 aa, Glycine max
MKPDEASASGKRFRDDVVDNRAKHVFHGQPMPTTMPAAPHPPAIRPRVRAIRGQATDPHSIAERLRRERIAERIRALQELVPSVNKTDRAAMLDEIVDYVKFLRLQVKVLSMSRLGGAGAVAPLVTDIPLSSVEEEGGEGARNRPAWDKWSNDGTERQVAKLMEENVGAAMQFLQSKALCIMPISLASAIYQSQPPDTSSIVKPETNPPS

SEQ ID NO: 280 - protein, 335 aa, Glycine max
MLQHQLLRDSGLLNMPLSLPGNDVVVDASTFESPNPSGKASVQTLYNGFAGSLHGVGQSSNQTQHFQHPQGSSNPMQGQNFGAVPAGGGSATNQAPASGAAAGGAPAQPRQRVRARRGQATDPHSIAERLRRERIAERMKALQELVPNANKTDKASMLDEIIDYVKFLQLQVKVLSMSRLGGAAAVAPLVADMSSEGGGDCIQANGKSNGGGAQASTTNTNTNQTTATTTSNDSLTMTEHQVAKLMEEDMGSAMQYLQGKGLCLMPISLATAISTATCPTRNVNVNPLINAAAGATHFPTAANPAGEGPSSPSMSVLTVQSAIAGNDGAASVSKP

SEQ ID NO: 281 - protein, 331 aa, Glycine max
MAGNSGSEGLGDDFFEQILAVPEAGTVGMLQLGSTTGAFRGASGLMPLGLNLEQAAFLRHQVNVDDDVVHVNVDDATIHQHHLTLHNNNNSSSPSSTAPITDRDSMHMRGLFSAFGQLHTPIRPTLPLPPPPRQPQLHLHHHNQFQGQAAAAPASMAAMPQPPGIRPRVRARRGQATDPHSIAERLRRERIAERMKALQELVPSINKTDRAAMLDEIVDYVKFLRLQVKVLSMSRLGGAGAVAQLVADVPLSAVEGDQDIEGGANEQAWDKWSNDGTEQQVAKLMEEDVGAAMQFLQSKALCIMPISLASAIFRMPQSEASTGIKPESNSH

SEQ ID NO: 282 - protein, 244 aa, Glycine max
MMLQLNSGDAATHLASFHAPPYQLGLSLDQGEGPFLTPEDASGSGKRFRDDAVDTRPNNVFDGQPMPTTVPTAPHPPAVRPRVRARRGQATDPHSIAERLRRERIAERIRALQELVPSVNKTDRAAMLDEIVDYVKFLRLQVKVLSMSRLGGAGAVAPLVTDIPLSSVEEEGGEGRNQPAWEKWSNDGTERQVAKLMEENVGAAMQFLQSKALCIMPVSLASAIYQSQPSGTSSIVKPETNPPS

SEQ ID NO: 283 - protein, 303 aa, Gossypium raimondii
MANNPNESPADDFLEQILGLSHFAPTETGLAGPDGRLSGNATTAGAPMLLQLSSGGGTGHIGAIGGGGGGAFHGQVFPLGLSLEQGKGGFLKPEEASGSSKRFRNEVVDGRAFSVKNVFHGQPVPATVAAGPHPPAMRPRVRARRGQATDPHSIAERLRRERIAERIRALQELVPSVNKTDRAAMLDEIVDYVKFLRLQVKVLSMSRLGAAGAVAPLVTDLPLSSVEDESGEGGRSQPAWEKWSNDGTERQVAKLMEEDVGAAMQFLQSKALCVMPISLATAIYHTQSPDTSSVVKPETNPPS

SEQ ID NO: 284 - protein, 306 aa, Helianthus petiolaris
MSTDPPEGYGDDFLEQILAIPSYNITGCLPVNTADSTGSETVSVHHQQQQPQQQLQPQKFPLGLSLDNGRETIGGAFAGQQQQLQQQQQRERGGSMNMSGLFPQFENLQSHSLLHTVPQGFQGQPTSSTAVTVPHPPTIRPRVRARRGQATDPHSIAERLRRERIAERMRALQELVPSCNKTDKAAMLDEILDYVKFLRLQVKVLSMSRLGGAGAVAQLVSDVPLQSVEGDGSENGYNNQQQGQAAWENWSNDDTEREVAKLMEEDVGAAMQFLQSKALCIMPISLASLIYPNHQPDVKPEPSAPS

SEQ ID NO: 285 - protein, 481 aa, Horedeum vulgare
MNYSDGSFFPSWPGNSASENYSFVDGSVESYTEEGSMPTTGYFRARSNQNLTFDEHEQNPAMLANGCLPYNTQTDLLSGEILSDDKPSNSLVELSQLQNNVCLQNNLIPPGTLQCNSTPGTFDLQLDTPGLLELPHALSSSIESNGSEVSAFLADVQAVSSASTLCSTFQNVPSYMEPVSLEAFSFQGMQNAAMFNNASHSNGNLSVFDEATMASLHDSKEFLNGSISSLGTGQQSQLAGGGLKAEQQEQNTMCNIPLPSFVSASQMAVSEAQGALIPSKTTSITHNNKSEYPIPISHSADVQHKANSGNGNSASAKPRARARRGQATDPHSIAERLRREKISERMKNLQDLVPNSNKADKSSMLDEIIDYVKFLQLQVKVLSMSRLGAPGAVLPLLAESQTEGRSNSPLSSPTTSQGLLDVAGPEDSLVFEQEVIKLMETSITNAMQYLQNKGLCLMPIALASAISNQKGTSAAAIPPER

SEQ ID NO: 286 - protein, 290 aa, lactuca perennis
MATDPPEGYGDDFLEQILAIPSYNIAGCLPGNTTDANASETVSVHRQQQQQQPVFPLGLSLDNGRETIGAFAGQQQQRERGGSMNMTGLFPSFENLQSHSLLHSVPQAFQGQSTTSTAVTVPHPPSIRPRVRARRGQATDPHSIAERLRRERIAERMRALQELVPSCNKTDKAAMLDEILDYVKFLRLQVKVLSMSRLGGAGAVAQLVSDVPLQSVEGDTSENGYNQPAWENWSNDDTEREVAKLMEEDVGAAMQFLQSKALCIMPISLASLIYPPQTPDSNSHVKPETV

SEQ ID NO: 287 - protein, 296 aa, Nicotiana benthamiana
MATNQPEGYADDFLEQILAIPSYAGLPPVADVGTSSETTSFTSASAAGLQQPLFPLGLSLENGRDDVSDAGAYAVKHEREGINIGNLYAGLEHLQSHAVRHAVPPVHHIQSFQGQPTTSTTMTVPHSPAIRPRVRARRGQATDPHSIAERLRRERISERIKALQELVPSCNKTDRAAMLDEILDYVKFLRLQVKVLSMSRLGGASAVAQLVADIPLQSMEGDSAESKSNQHIWEKWSNVDTEQEVAKLMEEDVGAAMQYLQSKSLCIMPISLAALIYPTQQPDDMSMVKPEPAAPS

SEQ ID NO: 288 - protein, 443 aa, Nicotiana benthamiana
MQAMNQYDPTSSHDDFLDQILSSVPSSSLCWPDLSKSWDPHHHHLSPPLPPNPSSGDDHQLPPSNPLQHFQYDDQSSSFLAAKLRQHQITGGGGGGGDAVAAAKALLLQQQLLLSRTLAGNGLRSPTGASGDNGFLNMLGNGDQNDSVGNPANDSSVQALFNGFTGSLGQNSSQPQHFLHPQGGRMQAQSFGAPATAPAMNQTPAASGSAGGGTTPAAQPKQQRVRARRGQATDPHSIAERLRRERIAERMKALQELVPNANKTDKASMLDEIIDYVKFLQLQVKVLSMSRLGGAAAVAPLVADMSSEGRGEGNGGRGGNGTASSSNNDSMTVTEHQVAKLMEEDMGSAMQYLQGKGLCLMPISLATAISTATCHSRNPMIPNGNGGNNPLLGGGGGLATNGGGGEAGGPSSPKLSVLTVQSATIGNGGIDPSVKDATSVFEA

SEQ ID NO: 289 - protein, 387 aa, Nicotiana benthamiana
MQAMNSQMSLQEENGASSGQNMSHSHFDPTSSHDDFLQQILSSVPSSSPWPDLSSGGDGHFDDQSIFVASKLRQNQITGGGGGGAAAKALMLQQQLLLSRGLLAGNGDQNDDVGNPENEISVQALYNGFAGSLGQTSNQPQHFHHAQGGSMQAQSFGAPASSTMNQTPAASGGSAGGGQPKQQKVRARRGQATDPHSIAERLRRERIAERMKSLQELVPNANKTDKASMLDEIIDYVRFLQLQVKVLSMSRLGGAAAVAPLVADRSSEGGGGDCAQANGGGRGSNGTTSLANNDSMTMTEHQVAKLMEEDMGSAMQYLQGKGLCLMPISLATAISTATCHSMKLNNPLLHGGGSGGSAAINGGGGGPSSPSLSASTVQSATMGNGGA

SEQ ID NO: 290 - protein, 302 aa, Nicotiana benthamiana
MANNPSEGPDDFFDQILGFPAYNGAETNLAGSDAGAIPPAMLLQLNSGDASGQFSGMGLGVGLGGGGGFHHPSQSGSFPLGLSLEGGKSGFMKMDDVPAVPGRRFRDDVVDSRASSSVKPGFHGQPMPSMPHPPAIRPRVRARRGQATDPHSIAERLRRERIAERIRALQELVPNVNKTDRAIMLDEIVDYVKFLRLQVKVLSMSRLGGAAAVAPLVTEIPISSVEEEISEGGNNQPAWEKWSSDGTERQVAKLMEENVGSAMQFLQSKALCIMPISLASAIYHSQPPDTSSLIKPETNPPS

SEQ ID NO: 291 - protein, 298 aa, Nicotiana tabacum
MATNQPGGYADDFLEQILAIPSYAGLPPVADVGTSSETTSFTSSSVAAAGLQQPLFPLGLSLDNGRDDVSDAGAYAVKHEREGINIGNLYAGLEHLQSHAVRHAVPPVHHIQPFQGQPTTSTTVTVPHPPAIRPRVRARRGQATDPHSIAERLRRERISERIKALQELVPSCNKTDRAAMLDEILDYVKFLRLQVKVLSMSRLGGASAVAQLVADIPLQSVEGDSAESRSNQHIWEKWSNVDTEQEVAKLMEEDVGAAMQYLQSKSLCIMPISLAALIYPTQQPDDPSMVKPEPAAPS

SEQ ID NO: 292 - protein, 524 aa, Oryza sativa
MGGFAYPFTPSPAWSRDAVFAGSPWAAGGVSSLADALVSYGAVDDEEAAFLGKTAASSPSTARLHEQQQLLLEAELLRHGDGLGFAAMDDDGGAAMLGALEPCAMPLTDSGGPPVICSSSSNDSSGSEHSAAMPAGGGFLVGEQQQHVPPAAYAAGGVLPSMAAGEETPQSFGFGSLFNGDLLQEATVSKYHHHQQQQQLGVVPSSQPHHLNDDIDFNTGKLMSFASGQQHVTPSIDSLQIDQKEFSSGLHHLNLSSLISGPLASFNATQSHRQPAEACGGKNGGAAPFVNLSEVLPKGNGSGSAGNGAPKPRVRARRGQATDPHSIAERLRREKISDRMKDLQELVPNSNKTNKASMLDEIIDYVKFLQLQVKVLSMSRLGAAEAVVPLLTETQTESPGFLLSPRSSSGERQAGAGAVTGGLPGDQPELLDGGAMFEQEVVKLMEDNMTTAMQYLQSKGLCLMPVALASAISAQKGTSSAAVRPEKKKNGDGDGGGDEEDVKGEFDAPRRPPVGRPKEMRSRV

SEQ ID NO: 293 - protein, 441 aa, Oryza sativa
MQPNARQMRGGGGGGGGGQDDFFDQMLSTLPAVWSELGSGKPAWDLTAGAVGGGGGASDDHSAAAFDDSALLASRLRQHQIDGGGDKPIMLQLSDLHRHHGLAAGDDSGGAAGFLPLSLFADRSQDDIDAAFKSPNGARGDHALYNGFGAAGMHGAAAMQPPPFGQGGSMPAQSFGGGAAASGGGGGGSASAAAAAGASSGGGAAAPPRQRQRARRGQATDPHSIAERLRRERIAERMKALQELVPNANKTDKASMLDEIIDYVKFLQLQVKVLSMSRLGGASAVAPLVANMSSESNGNGNATSSSGNGEAANGSSNGDNNGGGTLRVTEQQVAKLMEEDMGSAMQYLQGKGLCLMPISLATAISSATSSSLLPRTGGGAGGSLHEGGNGTSPPLVNGTATGCDDAGVFFSVKFVVELSFLLLNEDCRGKEESKLLVQKGP

SEQ ID NO: 294 - protein, 294 aa, Oryza sativa
MAGQQPQQQGPPEDDFFDQFFSLTSSFPGAAPGGRAAGDQPFSLALSLDAAAAAEASGSGKRLGVGDDAEGGGSKADRETVQLTGLFPPVFGGGGVQPPNLRPTPPTQVFHPQQSKQGGAAVGPQPPAPRPKVRARRGQATDPHSIAERLRRERIAERMRALQELVPNTNKTDRAAMLDEILDYVKFLRLQVKVLSMSRLGGAGAVAQLVADIPLSVKGEASDSGGNQQIWEKWSTDGTERQVAKLMEEDIGAAMQFLQSKALCMMPISLAMAIYDTQQTQDGQPVKHEPNTPS

SEQ ID NO: 295 - protein, 367 aa, Oryza sativa
MQPSSRDTVAGGGGEGTQDDFFDQMLSTLPSAWADLGGGGGGAAGKSPWEVDPAAAAAASQVFDESALLASRLRHHQIGGAGGGGGEKPVMLQLSELHRQAGGGEEDGSGAFSPLPLFTDRTNVPPREEMEGGFKSPNAAAGGEHALFNGFGVHGGSGGAGQPPFGQLRRERIAERMKSLQELVPNANKTDKASMLDEIIDYVKFLQLQVKVLSMSRLGGAAGMAPLVASMSSEGNSNGSSNGGGGKASKGGTGGEGGGGGGGGGGGGTGGGMRVTEQQVAKMMEEDMGTAMQYLQGKGLCLMPISLASAISSATSSASLLSRPSIRHAGAPPQTMLDAAGPTSPAAMSNGDDPRHAKADGGAGGTQ

SEQ ID NO: 296 - protein, 478 aa, Oryza sativa
MDYSAGSYMWPGNSGSENYNFVDGSSESYAEEGSLPPSGYFMGAGSDRSLKITENERNPTMLANGCLPYNTQAHPLSGQILPKGELPNNLLDLQQLQNSSNLRSNSIPPGVLQCNSTSGTFDAKLDTPGLAELPHALSSSIDSNGSDISAFLADVHAVSSAPTLCSAFQNVSSFMEPVNLDAFGFQGAQNVAMLNKTSLPNGNPSLFDNAAIASLHDSKEFLNGGSIPSFGTVLQALGAGGLKAAQQEQNIRNIPLPTFTSGSHLAVTDAQGPPLPSKIPPLIHDHNSEYPINHSSDVEPQANSAPGNSANAKPRTRARRGQATDPHSIAERLRREKISERMKNLQVLVPNSNKADKASMLDEIIDYVKFLQLQVKVLSMSRLGAPGAVLPLLRESQTECHSNPSLSASTISQGPPDMPDSEDSSAFEQEVVKLMETSIISAMQYLQNKGLCLMPIALASAISNQKGMAAAAAIPPEK

SEQ ID NO: 297 - protein, 499 aa, Oryza sativa
MAAAAAAGQISLDDLRNGGGVAANAGGGGGVHDDFLDQMLSSLPPSAWPDLAAGKAAEDDAEGMHHHHHQQQQQFGGPYDESAMLASRLRQHQISGGGGGGGGGAAAVKQMVLQQLADLRQGHHMMLQGLGGRSPAGGGGGGGDGGLLLPLTLGSGGSGGDVQALLKAAAANSAGGGDAGGVYGGGFAGSLHQQQQHFQPHPQTAPTIPTQSFGGGGGGGGGGTASGGGAAQPQAGAAGGGAPAPPRQRVRARRGQATDPHSIAERLRRERIAERMKALQELVPNANKLMQTDKASMLDEIIDYVKFLQLQVKASTYTKLLIHVLSMSRLGGAAAVAPLVADMSSEGRGGGAANGGAPAAAGSDSLTVTEQQVAKLMEEDMGTAMQYLQGKGLCLMPISLASAISSATCHLRPPVVAAAQQFPAGLGAAAAAAHHHQLSAAAAAAAMRGHLPGLNADGSVPASPSMSVLTAQSAMANGGGGAADGEGSQLKDAASVSKP

SEQ ID NO: 298 - protein, 293 aa, Oryza sativa
MAGQQPPTGGAEDDFFDHFFSIPSAAAAGAGGVGGFGSGDHHPFPLALSLDAEGAGAARRLLDGGHDGGRTDRDPVQLAGLFAPVFGAAAGVQPPHLRAPPPPQVFHAQPKPGEGAMAAPQPQQPPAPRPKVRARRGQATDPHSIAERLRRERIAERMRALQDLVPNTNKTDRAAMLDEILDYVKFLRLQVKVLSMSRLGGAGAVAQLVADIPISVKGEASDSGSKQQIWEKWSTDGTEKQVAKLMEEDIGAAMQFLQSKALCMMPISLAMAIYDTQHSQDGHSVKPEPNTPS

SEQ ID NO: 299 - protein, 274 aa, Picea abies
  misc_feature (257)..(259): Xaa can be any naturally occurring amino acid
MLPLPLSLGQAGKSGDMNEPGSREEIEASFKSVNNARDSNLGGLFQPFAVSPRGVRPTGQNFHAQPGQVPLQGYGGMPQPQHQNPPPTGVGAAPPVRPRVRARRGQATDPHSIAERLRRERIAERMKALQELVPNSNKTDKASMLDEIIDYVKFLQLQVKVLSMSRLGGAGAVAPLVADIPAEGANAPQGTRTNGSQNSSPDGLALTERQVAKLMEEDMGTAMQYLQGKGLCLMPISLASAINNSGSRPQAPSTPSXXXLLASNVNDRQVLEPS

SEQ ID NO: 300 - protein, 300 aa, Populus deltoides
MANNPTEPPADDFLQEILGMPNFASAEAGLVGADAGLAGAAAAQASMMLQLSSGDGSGHISDLGGAPGGGSAGFHGFPLGLSLEQGKGGFLKPEEASGSGKRFRDEIVDGRAKNVFHGQPMPTTVAIAPHPPAMRPRVRARRGQATDPHSIAERLRRERIAERIRALQELVPSVNKTDRATMLDEIVDYVKFLRLQVKVLSMSRLGGAGAVAPLVTDIPLSSVEDETGEGGRNQPAWEKWSNDGTERQVAKLMEENVGAAMQFLQSKALCIMPISLATAIYHTQPPDTTSIVKPETNPQS

SEQ ID NO: 301 - protein, 463 aa, Pinus radiata
MSLLPPGIGGQGLNSQENDPYPYDDSQFLANRLRQHQLSGNSSMNQTPNQASQGINETNTSPGRSMVLQLSTGSASASQLLASMGNSPRGTAVMTQSPSTGGSCNGSDGGMLPLPLSLGQAGKSGDINESRSRDEIEASFKSANHARDSNLGGLFPPFAASPRGVRPTGQNFHTQSGQVPMQVYGGMPQPQHQNPSPTGVGAAPPVRPRVRARRGQATDPHSIAERLRRERIAERMKALQELVPNSNKTDKASMLDEIIDYVKFLQLQVKVLSMSRLGGAGAVAPLVADIPAEGANAPQGTRTNSSQNSSPDGLALTERQVAKLMEEDMGSAMQYLQGKGLCLMPISLASAINNSGARPQAPSTPSLQGLLPPNANDRQILEPSNSALSALTSTSMTIQSSISSPGSGITEQGDNAHKAVNGTRNPKDSREANSVTKSNGIGGPALSKNAVKGEDEPQRRTGQ

SEQ ID NO: 302 - protein, 325 aa, Picea sitchensis
MDDIFDQLLSSSWEDINGADRSSLDSSAGGPTNCLPGDSMGTLQASSRVSTMSVTPSSHMSPNLEGQAQNNDVQNSSSSVIAGENTPYLLKELLVCSQATDPHSIAERERRERIAKNLKSLQELVPNANKTDKASMLDEIIDYVKFLQLQVKVLSMSRLGGAGAVAPLIADVPAEGSGSLASAALGQAGGSLSQDGLAFEQNVVKLMEKDMTAAMQYLQNKGLCLMPIALATAISSSTGKPLLGSGVTNSVDSTSDRQSSGNQPASLTVDSCSGALGMGSAGFGSDFLLKENTVEKRGRELVPTAESNGAEFGIISSLPKLRKKE

SEQ ID NO: 303 - protein, 333 aa, Populus taeda
MLARENRSGDTEHDDLQGTLLTSYTGPQGGQTVLPRTPGAQSHQQNLSTQTIQSGEGTSLQQYGNHSAVSQLQSGAGGGNAANGAARPRVRARRGQATDPHSIAERLRRERIAERMKSLQELVPNSNKTDKASMLDEIIEYVKFLQLQVKVLSMSRLGGAGAVAPLIADVPSQGSGGVMSTALGQASGPLTLSQDGLAFEQEVARLMESNMTSAMQYLQNKGLCLMSIALATAISSSSGKPVLATVPGTGVDSSEKQNSDMQSIVLPFSSSSTTMGLRATASGSDAPINENSINKASIEKVVAEKSNGISPGLSSDVPKVGSQSREELLKRAQ

SEQ ID NO: 304 - protein, 300 aa, Populus trichocarpa
MANNPTEPPTDDFLQEILGMPNFASAEAGLVGADAGLAGTASVQAPMMLQLSSGDGSGHISALGGAPGGGGAGFHGFPLGLSLEQGKGGFLKPEEASGSGNRFRDDIVDGRVRNVFHGQPMPTTVTAATHPPAMRPRVRARRGQATDPHSIAERLRRERIAERIRALQELVPSVNKTDRAAMLDEIVDYVKFLRLQVKILSMSRLGGAGAVAPLVTDIPLSPVEDETGEGGRNQLAWEKWSNDGTERQVAKLMEENVGAAMQFLQSKALCIMPITLATAIYHTQPPDTTTIVKPETNPPS

SEQ ID NO: 305 - protein, 331 aa, Populus trichocarpa
MAGNPPPEGLGDDFFEQILAGQPPGYGGEAVGSTSLPMMGLQLGSSAANVGLMRSSANNNMGMMPLGLNLEHHGFLRQQQDDGSSSLDTNNSNNINNASPFSITSAGFLGRDSVHMTSLFPTFGQLQIHSSIRSAPPPLGPPQIHQFNSQPTSGAVSAVPQPPGIRPRVRARRGQATDPHSIAERLRRVRITERVKALQELVPTCNKTDRAAMLDEIVDYVKFLRLQVKVLSMSRLGAAGAVAQLVADVPLSSVQGEGIEGGANQQAWENWSNDGTEQEVAKLMEEDVGAAMQLLQSKALCIMPVSLASAIFRARPPNAPTLVKPESNPPS

SEQ ID NO: 306 - protein, 334 aa, Populus trichocarpa
MAGNPPPEGLGDDFLEQILAAQPPGYGGGGEVMGSTSLPMMGLQLGSCAGNVGLLRSNANNNMGMMPLGLNLEHHGFLRQQQDDSGSSLDTNNSNNINNTPPSIKSARILGRDSVHMTSLFPTFGHLQIHSSIRPTPPPPGPPQIHQINSHPNPGAVSAVPQPPGIRPRVRARRGQATDPHSIAERLRRVRITERVKALQELVPTCNKTDRAAMLDEIVDYVKFLRLQIKVLSMSRLGAAGAVAQLVADVPLSSVQIKGEGNEGGANQQSWENWSNDDTEQEVAKLMEEDVGAAMQFLQSKALCIMPISLASAIFRARPPNASTLINTESNTPS

SEQ ID NO: 307 - protein, 456 aa, Populus trichocarpa
MISSNQSVESLATQDTSSVVLGSESDYAVDKVLISEQARLQNDCQNCNGNPSPDGMARGNLKFGNTGLQCNGILPTLSSLNYPNQLPIVGDLTSYLSFSEASNAGCNGREQSEYLRSLKNLQNLSSIPQLWPSQSYEGVSSLPPLMGQDRIEGSGLRGGNLDDDMHIMGKGYMGMDEILRLDKLSASPTTEGKEDLQSCPFSSGIAEPNVNMSMNQLSSMPQTTSAAPVEGCNGTGKTRVRARRGHATDPHSIAERLRREKIAERMKNLQELVPNSNKVDKASMLDEIIEYVKFLQLQVKVLSMSRLGAAGAVIPLLTDGQPEGHNSLSLSPSAGLGIDISPSADQIAFEQEVLKLLESDVTMAMQYLQSKGLCLMPIALAAAISSVKASLSGTTSEERKNNGYTSGLVSSSSSITGIDTHPMSNDNNIATGTLSSKGMIVNGCNEVVKQEVLKNT

SEQ ID NO: 308 - protein, 300 aa, Populus trichocarpa
MANNPTEPPTDDFLQEILGMPNFASAEAGLVGADAGLAGAAAAQASMMLQLSSGDGSGHISDLGGAPGGGSAGFHGFPLGLSLEQGKGGFLKPEEASGSGKRFRDEIVDGRAKNVFHGQPMPTTVAIAPHPPAMRPRVRARRGQATDPHSIAERLRRERIAERIRALQELVPSVTKTDRATMLDEIVDYVKFLRLQVKVLSMSRLGGAGAVAPLVTDIPLSSVEDETGEGGRNQPAWEKWSNDGTERQVAKLMEENVGAAMQFLQSKALCIMPISLATAIYHTQPPDTTTIVKPETNPPS

SEQ ID NO: 309 - protein, 468 aa, Poncirus trifoliata
MQPCSSGGEMQGISSLLSNGSHEQQSQIHQSATFDPTSQDDFLEQMLSSLPSCSWTDLKSPWGVVDLNPNNNNNNINNKQPRDLSDETAPSTTQENNVPAGFQFDESMILASKMRQHQISGNTGSGNNNSAAAKFMMQQQQQQQIMMAAARGGIGLPLSLGNGGDNDIVDASSFKSQQGGDGSVQALYNGFTGSLHGSTQPQHFHHLQGGSMPGQTFGAPGPVMNQTQAQASGSTGGGGNTPAQQPKQRVRARRGQATDPHSIAERLRRERIAERMKALQELVPNANKTDKASMLDEIIDYVKFLQLQVKVLSMSRLGGAAAVAPLVADMSSEGAGGGDCIQANGRNPNGAQTTSANDSLTVTEHQVAKLMEEDMGSAMQYLQGKGLCLMPISLATAISSATCHSRNPIISTSNNNNNNGNPHHNPLFQSNGEGPTSPSMSVLTVQSATMGNGGADGSVKDAASVSKP

SEQ ID NO: 310 - protein, 326 aa, Ricinus communis
MAGNPPPEGLGDDFFEQILAVQPGYGGGDGGGGGDVVGSTMPMMGLQLGSASSGGGGLRTNNMGMMPLGLNLEFLRQQEDGSGALDNNNHTNNNNNNVSSSTTSVINDRDSVHMASLFPTFGQLQTQTLRPPPPPHLHQPFHGQPTPGVVSAASQPPAIRPRVRARRGQATDPHSIAERLRRERIAERMKALQELVPTANKTDRAAMIDEIVDYVKFLRLQVKVLSMSRLGAAGAVAQLVADVPLASVEGESIDGAAANQQTWEKWSNDGTEQQVAKLMEEDIGAAMQFLQSKALCIMPISLASAILRTHPPDAPSIIKPESNTPS

SEQ ID NO: 311 - protein, 299 aa, Ricinus communis
MANNPTEPPADDFLQEILGLPNFASADAAGLVGADGALATPMMLQLSSGDGSNHITALGGGGGGGGGAGFHGFPLGLSLEQGKGGFLKPEEASGSGKRFRDDVVDGRANTVKNVFHGQPMPTTMAAAPHPPTMRPRVRARRGQATDPHSIAERLRRERIAERIRALQELVPSVNKTDRAAMLDEIVDYVKFLRLQVKVLSMSRLGGAGAVAPLVTDIPLSSVEDETGEGGRNQPAWEKWSNDGTERQVAKLMEENVGAAMQFLQSKALCIMPISLATAIYHTQAPDTSTIVKPETNPPS

SEQ ID NO: 312 - protein, 277 aa, Sorghum bicolor
MAGQPPPPGGSEDDFLEHFFAFPSAASAAAGGHAGAGAGGDHPFPLALSLDAAAEPKPDRDPVQLAGLFPPVFAGAGGVQQPHLRGPPPPQMFQAQPKPGEGGMAPQPPAPRPKVRARRGQATDPHSIAERLRRERIAERMRALQELVPNTNKTDRAAMLDEILDYVKFLRLQVKVLSMSRLGGAGAVAQLVADIPLSVKGEASDSGSTQHIWEKWSTDGTEKQVAKLMEEDIGAAMQFLQSKALCMMPISLAMAIYDTQHSQDGHSLMKPEPNTSS

SEQ ID NO: 313 - protein, 302 aa, Solanum lycopersicum
MANNPSEGPSDDFFDQILGFPAYNGAEPNLAGNDAGAIPPAMMLQLNSGDGSSQFTGVGLGVGLGGGGFHGHGGGGSFPLGLSLEQGKGGFLKMDDVSAPGRRFRDDVVDSRASSSVKPGFHGQPMPSMPHPPAIRPRVRARRGQATDPHSIAERLRRERIAERIRALQELVPSVNKTDRAVMLDEIVDYIKFLRLQVKVLSMSRLGGAGAVAPLVTDIPISSVEEESSEGGNNNQPAWEKWSSDGTERQVAKLMEENVGAAMQFLQSKALCIMPISLASAIYHSQPPDTSSLVKPETNPPS

SEQ ID NO: 314 - protein, 296 aa, Solanum lycopersicum
MADNPPEVYAADDFLEQILAIPSYASLPVTDLTAGASSENSTSGVSQLQQQPLFPLGLSLDNGFADANNTGGFQVKTEREAMNMGNLYPGLEHLQSHAVCLSVPQVHQVQPFQGHPTSSAIVTIPHQPAIRPRVRAQRGQATDPHSIAERLRRERISERIKALQELVPSCNKTDRAAMLDEILDYVKFLRLQVKVLSMSRLGGTSAAAQVVADIPLQSVEGDTCESHSNQHVWEKWSDSETEQEVAKLMEEDVGTAMQYLQSKSLCIMPISLAALIYPTQQSDNQSMVKPEQAAPL

SEQ ID NO: 315 - protein, 304 aa, Solanum lycopersicum
MAANQPEGYADDFLEQILAIPPYSGLPVADVGTPSETTSFTSASAVSHLNSAAAAGLQQPLFPLGLSLDNGRDDVGDAGPYAVKHERDGMNIGNLYAGLEHLQSHAVRHSVPSVHHVQPFQGPPTTSTTVTVPHPPSIRPRVRARRGQATDPHSIAERLRRERISERIKALQELVPSCNKTDRAAMLDEILDYVKFLRLQVKVLSMSRLGGASAVAQLVADIPLNLWEGDSGESRSNQHIWDKWSNVDTEREVAKLMEEDVGAAMQYLQSKSLCIMPISLAALIYPTQQPDDQSLVKPEAAAPS

SEQ ID NO: 316 - protein, 302 aa, Solanum tuberosum
MANNPSEGPSDDFFDQIMGFPAYNGAETNLAGNDAGAIPPAMMLQLNSGDGSGQFTGVGLGVGLGGGGFHGHGGGASFPLGLSLEQGKGGFLKMDDVSAPGRRFRDDVVDSRASSSVKPGFHGQPMPSMPHPPAIRPRVRARRGQATDPHSIAERLRRERIAERIRALQELVPSVNKTDRAVMLDEIVDYVKFLRLQVKVLSMSRLGGAGAVAPLVTDIPISSVEEESSEGGNNNQPAWEKWSSDGTERQVAKLMEENVGAAMQFLQSKALCIMPISLASAIYHSQPPDTSSLVKPETNPPS

SEQ ID NO: 317 - protein, 304 aa, Solanum tuberosum
MAANQPEAYADDFLEQILAIPSYSGLPVADVGTPSETTSFTSASAVSHLNSAAAAGLQQPLFPLGLSLDNGRDDVSEAGAYAVKHERDGMNIGNLYAGLEHLQSHAVRHSVPSIHHVQPFQGPPTTSTTVTVPHPPSIRPRVRARRGQATDPHSIAERLRRERISERIKALQELVPSCNKTDRAAMLDEILDYVKFLRLQVKVLSMSRLGGASAVAQLVADIPLQSVEGDSGESRSNQHIWDKWSNVDTEQEVAKLMEEDVGAAMQYLQSKSLCIMPISLAALIYPTQQPDDQSLVKPEAAAPS

SEQ ID NO: 318 - protein, 447 aa, Solanum tuberosum
MQAMNSLLSQQQQSQMSLQDLQNGGNGGSTGGVGGLGQHNMGHFHFDPTSSHDDFLEQILSSVPSSSPWPDLSKSWDPHHHLSSPPHNPSSGEDQPPSNPLHSQFHYDDQASSLLASKLRQHQITGGGAAAAAKALMLQQQLLLSRTLAGNGLRSPNGASGDNGLLSLPLNLSNNGDQNDGVANPANDNSVQALFNGFTGSLGQTSNQPQHFHHPQGGSMQSQSFGAPAMNQTPAASGSAGGGGGSTPAAQPKQQRVRARRGQATDPHSIAERLRRERIAERMKALQELVPNANKTDKASMLDEIIDYVKFLQLQVKVLSMSRLGGAAAVAPLVADMSSEGRGEGNVGRGGNGTAASSSNKETMTVTEHQVAKLMEEDMGSAMQYLQGKGLCLMPISLATAISTSTRIPLLSPEAGRPASPTLSALTVQSATIGNAAGKDATSLFEA

SEQ ID NO: 319 - protein, 382 aa, Solanum tuberosum
MQAMNSFQSTGENGASSGEHISHSHFDPSSSHDDFLQQILSSVPSSSPWPEISGDGHPYNFDDHQSTLLASKLRQHQINGGSSAAAAAKALMLQQQLLLSRGIAGNGGDQNDDGLNPGNDISVQALYNGFAGSLGQTSNQSQHFHHSQAQSFGAPAASLTMNQTPAASGSAGGAQPKQQKVRARRGQATDPHSIAERLRRERIAERMKSLQELVPNANKTDKASMLDEIIDYVRFLQLQVKVLSMSRLGGAAAVAPLVADRSSEGGGDCVQGNGGRGGSNGTTSSANNDSSMTMTEHQVAKLMEEDMGSAMQYLQGKGLSLMPISLATAISTSTCHSMKPNNPLLLGGGSAINGGGETGGGPSSPTLSASTVQSATMGNGGT

SEQ ID NO: 320 - protein, 290 aa, Triticum aestivum
MLLCSTIQVIQMGNLSVFDEATMASLHDSKEFLSGSISSFGTAEQSQLAGSGLKAEQQEQNAMCNIPLPFASGSQMAVSEAQGAMIPSKISSTIHNNKSEYPVPISHSADAQNKANSANGNSASAKPRARARRGQATDPHSIAERLRREKISERMKNLQDLVPNSNKADKSSMLDEIIDYVKFLQLQVKVLSMSRLGAPGAVLPLLAESQTEGRSNSPLSSPTASQGLLDAAGPEDSLVFEQEVIKLMETSITNAMQYLQNKGLCLMPIALASAISNQKGTSAAAIPPER

SEQ ID NO: 321 - protein, 485 aa, Vitis vinifera
MDEYLDHLFSSTSWSDVNVKEGSSWICGEPSQTNGMLSDSIGIYEGDKKNSPVGMTNSNLMIEGLVTQDTSSIVLGGESDHGLGKGLLLEEAPRQQDLQNTEGNSSLNGAVNGSSEVGYVGLQLNTPTSTPCSLDLGSPKQLSLIGGMSRSSRPFTELDHVGCNGNEPSDFQRSVGNFQALPPIPQLWSQPSYGGGSSLSPVMGEYKMQGFGLQGEYVDNEMDIMRNRYVGDEILQLDNISSAIPIKGKEEQHTHPFSPSAVGPHMTMTASGLQSLPQTTVGTASGGCNGTGKPRVRARRGQATDPHSIAERLRREKIAERMKNLQELVPNSNKTDKASMLDEIIEYVKFLQLQVKVLSMSRLGAAEAVVPLITDGQAEGSKGLSLSPSAGQAEDICQSPDQIAFEQEVVKLMESNVTMAMQYLQSKGLCLMPIALATAISSGKAASSGTGSDEGKNAATPVAATPVATAYLALGHIIHLLMAMF

SEQ ID NO: 322 - protein, 418 aa, Vitis vinifera
MLSTLPSWSDLPANPKSPWELNASNPISMPSNKSRDLSDDTTPSNPDNVQFAFDESAMLASKLRQHQISGNSSAAKSALMLQQQLLLSRGVAMGRSPSNGSGAGESGLLQLPLSLSNGDSCLVDRSQNDVVDGSSSFKSPNQGGDGSVQALYNGFAGALHGSGQASNQAQNFHHPQGGSMQAQNYGAPATRVRARRGQATDPHSIAERLRRERIAERMKALQELVPNANKTDKASMLDEIIDYVKFLQLQVKVLSMSRLGGAAAVAPLVADMSSEGGGDCIQASGTSGPTGGRATNGTQTTTSNDSLTVTEHQVAKLMEEDMGSAMQYLQGKGLCLMPISLATAISTTTCHSRNPMVAAAAVAASNINNGSHTHPLLPNSNADGPSSPSMSVLTVQSATMGNGLADAPVKDAASVSKP

SEQ ID NO: 323 - protein, 289 aa, Vitis vinifera
MASNPSEAPADDFLEQILGIPTYPAADPNLAANDVNLAAPMVLQLGSGEGSGHIAGGYQGTMFPLGLRLEQGKSSFLKPEDASGSGKRFREEVIDGRASTVKNAFHGQPMQATVAAAPHPPAIRPRVRARRGQATDPHSIAERLRRERIAERIRALQELVPSVNKTDRAAMLDEIVDYVKFLRLQVKVLSMSRLGGAGAVAPLVTDIPLASVEEEASEGGRNEPAWEKWSNDGTERQVAKLMEENVGAAMQFLQSKALCIMPISLASAIYHSQQPDTTPLIKPQTNPPS

SEQ ID NO: 324 - protein, 313 aa, Vitis vinifera
MATNPPEGYADDFLEQILAIPSYPGHDPNMVGTGSTMVLQLSSGDGSGHVAGGGFQGPVFPLGLSLESGIPATQVAPGSGERFRDDVDARGSSGRSERESVHLDGLFPAYGHVQSLSVRPAVPQVHQAFHGQPTPVPITAAPHPPAIRPKVRARRGQATDPHSIAERLRRERIAERMKALQELVPSSNKTDRAAMLDEIVDYVKFLRLQVKVLSMSRLGGAGAVAQLVADIPLPAVEGETGEGGSNQQAWDKWSNDGTEREVAKLMEEDVGAAMQFLQSKALCIMPISLAAAIYPAHQTDTPTLIKPEPNAPS

SEQ ID NO: 325 - protein, 285 aa, Zea mays
MAGQPPPQGPEDDFFDQFFSMTAGGSYPGATAGGGRAPGDQPFSLALSLDAAAAEASGSGKHADGGKADREAIQLPGLFPPAFGGGVQPPHLRATPPTQVFHAQQPKQGGAAVGPQPPAPRPKVRARRGQATDPHSIAERLRRERIAERMRALQELVPNTNKTDRAAMLDEILDYVKFLRLQVKVLSMSRLGGAGAVAQLVADIPLSVKGEASDSGSKQQIWEKWSTDGTERQVAKLMEEDIGAAMQFLQSKALCMMPISLAMAIYDTQHSQDGQPVKPEPNTPS

SEQ ID NO: 326 - protein, 285 aa, Zea mays
MAGQPPPSGASEDDFLEHFFAFPSAASAGAAGGHAGAGVGGDHPFPLALSLDAAAEAKPDRDPVQLAGLFPPVFAGAGGVHQPHLRGPPPPQMFQAQPKPGEGGMAPQPPAPRPKVRARRGQATDPHSIAERLRRERIAERMRALQELVPNTNKTDRAAMLDEILDYVKFLRLQVKVLSMSRLGGAGAVAQLVADIPLSVKGEAGDGGGAPQQQQQQHVWEKWSTDGTEKQVAKLMEEDIGAAMQFLQSKALCMMPVSLAMAIYDTQHPLDGHGHSLKPEPNASS

SEQ ID NO: 327 - DNA, 922 bp, Allium cepa
cacttcacttcccctttcttcatttcttcaatacctacaaaccctagcttcactttactatttaaaaatggcgtctaataacaacccgcaacctccttccgatggactcaacgacgacttcttcgaccaaattttttccatgccttccgccttcgccgcctcctcagcctctactgacgccaccgaagctctcaactatgctgattcctccaccactggggttaccccgatgttctcacttggcctcagcttggatcagcagcctaagtctgattcgtcccaatcggaaagagagcatccggttcagtttgcttgcttgtttccacagtatgggcacaataatcaagttcatcaaacccggcctaatctttctcctcctcaagttcttcatggacaagcaatgcagagcagtatggctgcaacaccacaacctacaggtccacggccaagggttagggctaggagaggccaagctaccgatcctcatagtatagctgagcgattgaggagggaaagaatagcagaaaggattagagctttgcaggaattggtgcccagcactaataagaccgatagagctgtgatgctggatgaaattgtagagtatgtgaaattcttgaggcttcaagtaaaggtactaagcatgagtagactaggtggtgctggtgctgttgcacagctggtagccgatatccctatgtcttcttcagttgagggtgattcaagtgaaagtgggaagacaagctaccaagggtgggaaaaatggtcaaccgacggcaccgagcgtcaggtggcaaaactaatggaagaagatgtaggggctgcaatgcaatttctccaatcaaaagccctctgcatcatgcccatatctttagcagctgcaatttgtcaaacgaatccctcaaccgaaatctctttcatg

SEQ ID NO: 328 - DNA, 1456 bp, Arabidopsis thaliana
gtctgtgtctcttcgtcctcattagcttaagcatcatcattctctcacctaacaactccacacaagattcttcgcatggaaagttgttcttcgacttctcttctctaactcgctatcttttaactcacccagctccactgagtcgaaaatttcaaacctttactcgtttccttcatggctaataacaacaacatcccacatgatagcatctccgatccatctcctaccgacgatttcttcgagcagatcctcgggctttccaacttctccggttcttcaggttctggtctctctggaatcggcggcgtgggtccacctccgatgatgcttcagcttggttcaggcaacgaagggaatcataatcatatgggtgccattggaggaggtggacctgtagggtttcataatcagatgtttccgttgggattaagtctcgatcaagggaaaggacatggctttcttaaacctgatgaaactggtaaacgtttccaagacgatgttcttgataatcgatgttcctctatgaaacctattttccatgggcagccaatgtcacagccagctccaccaatgccgcatcaacagtctactattcggcctagagttagggctaggcgaggtcaagctaccgatccacatagcatcgctgagaggctccgaagggaaagaatagcagaacggatcaggtcgttgcaggaacttgtacctaccgttaacaagacagatagggctgctatgatcgacgagattgtcgattatgtaaagtttctcaggctccaagttaaggtcctgagcatgagccgtcttggtggagccggtgctgtcgcaccactagtcactgaaatgccattatcttcatcagttgaggatgagacgcaggccgtgtgggagaaatggtcaaacgatgggacagagaggcaagtggctaagctgatggaagaaaacgttggagcagcgatgcaacttttgcaatcaaaggctctttgcataatgccgatctcattggcaatggcgatttaccattctcagccaccagacacatcttcttcaatcgtcaaaccagagatgaatcctccaccgtagatttttgttcatccaacggtccccagctgatgattgacattttgctctgtttcccactactagacttttgtgactcatgaaaggtaagtaaaaaggcattggagatggaatctaagtaggatttgtgcagtaaagaagtaaaacgggatctgtcaaaagaaggaaaaagctctcgcttgcttggctagtatttatcattttgatgaaagtaactcttttttgttcaaagactttagtgtgattttcaggaccaagggctttgagggtagtgctagctgtagtaatagtaatgaaggtgtgggatcgtgtttctgaattatgtaaaaaaggaagaaaaaacaaatgttggtattatattatggttttgcctctc

SEQ ID NO: 329 - DNA, 1588 bp, Arabidopsis thaliana
gctcctttctcgtctctgtcttcttcgtcctcattcgttttaaagcatcaaaatttcatcaacccaaaatagattaaaaaaatctgtagctttcgcatgtaaatctctctttgaaggttcctaactcgttaatcgtaactcacagtgactcgttcgagtcaaagtctctgtctttagctcaaaccatggctagtaacaaccctcacgacaacctttctgaccaaactccttctgatgatttcttcgagcaaatcctcggccttcctaacttctcagcctcttctgccgccggtttatctggagttgacggaggattaggtggtggagcaccgcctatgatgctgcagttgggttccggagaagaaggaagtcacatgggtggcttaggaggaagtggaccaactgggtttcacaatcagatgtttcctttggggttaagtcttgatcaagggaaaggacctgggtttcttagacctgaaggaggacatggaagtgggaaaagattctcagatgatgttgttgataatcgatgttcttctatgaaacctgttttccacgggcagcctatgcaacagccacctccatcggccccacatcagcctacttcaatccgtcccagggttcgagctaggcgtggtcaggctactgatccacatagcatcgctgagcggctacgtagagaaagaatagcagaacggatcagggcgctgcaggaacttgtacctactgtgaacaagaccgatagagctgctatgatcgatgagattgtcgattatgtaaagtttctcaggctccaagtcaaggttttgagcatgagccgacttggtggagccggtgcggttgctccacttgttactgatatgcctctttcatcatcagttgaggatgaaacgggtgagggtggaaggactccgcaaccagcgtgggagaaatggtctaacgatgggactgaacgtcaagtggctaaactgatggaagagaacgttggagccgcgatgcagcttcttcaatcaaaggctctttgtatgatgccaatctcattggcaatggcaatttaccattctcaacctccggatacatcttcagtggtcaagcctgagaacaatcctccacagtaggatttctgcaataaagagtttgtacagctaatccaactgtccaacatgggtttttcttctgctctaatgactctggtttcttctctcctctctcacccacttgaaaggtaaaaaagtgaaaaaggctttgtagatggaatcaatgtaggatttgcagtagagggaaaaaaaatgtcaaaaagctcaattgatcaagtattattgtaatcattgtacctttattttaggtggactttgatgaaagcaactttttgttttcaagactttagtgggaggttgaggaaggagcttgaagggtgttatttattagtagtagtagtagtgggaagttgtgggaccttgttgagttgtgttcaaattgaagaaaaaacaagtatttgtaatttgtcaccccttgtattattatttattttgtatgactttggagtagtataattaattatcaaataatattattagtttgatctagt

SEQ ID NO: 330 - DNA, 1407 bp, Arabidopsis thaliana
tcttcccaaaaaaaagtgtagaagcagaagaaacccatcatcatcatgatgaactcttctcttctaactccttcttcttcatcttcttcccatatccaaactccatcaacaactttcgaccacgaagacttcctcgatcaaatcttttcctcggccccgtggccctccgtcgtcgatgatgctcatcctcttccctccgatggcttccacggccacgatgtcgactcaaggaatcagccgatcatgatgatgcctttgaatgatggctcctccgtccacgctctttataatggcttctccgtcgccggatctcttcctaactttcaaatccctcagggatcgggaggaggattgatgaaccaacaaggacaaacgcaaacgcaaacgcaacctcaggcgagcgcgtctacagctactggtggtacggtggcggctccgccgcagagtaggactaaaatccgagctaggagaggtcaagcaactgatcctcatagtatcgccgaaaggttacgaagagagagaattgcggaaagaatgaaagctcttcaagaactcgttcctaacggcaataagacagacaaggcatcgatgctcgatgagatcatagattatgtcaagtttttacaactccaagtcaaggtactgagcatgagcagattgggaggtgctgcttccgtttcttctcaaatctccgaggctggtggatcccacgggaacgcatcctccgccatggtcggcggtagccagacggccggaaactccaacgacagcgttacaatgacggaacatcaagtggccaaactaatggaagaagacatgggctcggccatgcaatatcttcaagggaaaggtctttgtctcatgccaatctctttagccaccgccatctcaaccgccacgtgtcactcccgtaaccctttgatccctggagctgttgccgacgtcggaggtccttcccctcccaatctttctggcatgaccatacagtcgacgagtacaaaaatgggtagcggtaatgggaaattaaacggtaacggcgtgaccgagaggtcgtcttctatcgccgttaaagaggccgtatccgtttcgaaagcgtgataacggccgtttacttttggggttaggcagagagataccaaaaacaaagagaaagtggggtgaagtgggagataaagtcaaagtctacgaagaatgaggttgaggttgtttgatgtgttctctgaacgaagccatatttttcgtagagttttggttcttttacctacgcactacaaaaccattcaagggacatttctttttcttttttaaatatatggttgcaatatgttttatttttattaaataaagttggtatcgttgatctgaatattaggctagaaaaagaaaaaaatagtatattggtttttc

SEQ ID NO: 331 - DNA, 1230 bp, Arabidopsis thaliana
aacattcattttcattctcactccccaccaaaaaaaaaaaaaacagaagccatgaactcctcgtctcttctaactccttcatcatctccttctccacatcttcaatctcctgcaacattcgaccacgatgatttcctccaccacatcttctcctccactccttggccctcatccgttctcgacgacactcctccaccaacttccgattgtgcccccgtcactggattccaccaccacgacgccgattcaagaaaccagatcactatgattcctttgtcacataaccatcctaatgacgctctcttcaatggcttctccaccggatctctccctttccacctccctcaaggatcgggaggtcaaacgcaaacgcagtcgcaggcgacggcgtcagccaccaccggtggtgcaacggcgcaacctcagacaaagcctaaagtccgagctaggagaggtcaagccactgatcctcacagtatcgccgaacggttacggagagagaggatagcggaaagaatgaaatctcttcaagaacttgtccctaatggtaacaagacagacaaagcatcaatgctcgatgagattatcgattatgtcaagttcttacagctccaagtcaaggtactaagcatgagtagactgggcggtgctgcttctgcttcttctcaaatctctgaggatgccggtggatcccacgaaaacacctcctcctccggcgaggcgaagatgacggagcaccaagttgcaaagctaatggaagaggacatgggatcagccatgcaatatctacaaggcaaaggtctttgcctcatgcccatctcgttagccaccaccatctccaccgccacgtgtccttctcgtagccccttcgttaaagataccggcgttcctttgtctcctaacctatccactacaatagttgctaacggtaatggctcatcgttggtcaccgttaaagacgctccctccgtttccaagccgtgataacggccatttgtccatttcattttcccttttttgggtgggaaagagagaaaaaagtttagaagacaaagacaagtgggataggtggttttggtcaaagtttagaaagaataaggtcgtgttttcggatacgacaccgtatttgcgtacactttggttttctgtctttacctactacaaaccacccataagcacactcatgttatcatgtttttttttttttggtttataaagttatatccttaa

SEQ ID NO: 332 - DNA, 1019 bp, Arabidopsis thaliana
atggaaaatggaaatggagaaggaaaaggagaattcataaaccaaaacaatgacttcttccttgattccatgtcaatgctctcctctctccctccttgttgggatccatctcttcctcctcctcctcctccgccacaatctcttttccacgctctagccgtcgacgcccccttccccgaccagttccatcatcctcaggagtcaggaggtccaacaatgggtagccaagaagggttacagccacaaggtacagtgtcgaccacgagcgcacctgttgttcgtcaaaagccaagagttcgagccaggagaggccaagccaccgatcctcacagtatcgctgagaggcttagaagggaacgcatcgcagagcgtatgaagtctctccaagaactggttcccaacaccaacaagacggataaggcatcaatgttggacgagatcatcgagtatgttaggttccttcagcttcaagtcaaagtactaagcatgagcagattgggaggtgcaggatcagttggtccacgcctcaatggtctctccgcagaggcaggaggacggctcaatgccctcactgcaccgtgcaatggcttaaatgggaatggaaacgctacaggatcgtccaatgagagcctaaggtcaacagaacaaagagtggcgaaactgatggaggaagacatgggatcagcaatgcaataccttcaagggaaggggctttgcttaatgccaatatctctcgcaaccgcgatatcatcatcaactactcactctcgtggatccctctttaaccccatctccagtgctgtagcagcagaggattcaaatgtaacagcaactgcagttgctgcacctgaagcctcgtctactatggatgatgtatctgcttccaaggcctgaaccatagaatactcatgtgtttcgttttctcagtttaagtcaaacgctaatctccctatctttttactattttctctgctaagcaacaataatataaaacagttgcaacaaagaacaaaaccgac

SEQ ID NO: 333 - DNA, 1763 bp, Aquilegia vulgaris
cactttcaaaactctctctctctttctcttcccgaaactcaaaatttctccggtttatcgggtatcggatctgtaacttgtttcgccgacaacctcgtttttcgattttctctcataaacccaaaacaaaaccctttgtctatttctatgtttaatgttcttcaaaaaccctaacacttcaatcaaacacgcatacactcttactctcttctttctcacaacatggctaataataataatcctacagaaggattaacagatgatttccttgatcagatcttatcttatggtgctcacgaaggtaatttggcgggaaatgatgttaatttggcgggaacaactacacctggaggttcgatggccttgcagttgagttcttctggaggtgatattaccggtagtggtgggtatcatcatcatcatcagcatcaacatcatcatcagttaagtggtggtggtggtggttttccgttagggttaagtttagaacaaagtggtaaaggtggtttttttaaaccagatgaagcttctggaagtggtaagcggtttcgtgacgatttcgttgatttgaaagctgtttcttctactaacaacgataacaacgatagaggagactctgtacatttgaataatttgtttccagcatttggacatgtgcaacaacagcaacaggctcactctgttcgacctccttcacatcaaaatcaaatcaaccagcctttccttgggcatccaacacctggggctgttgctgttgtaccacatccacctgccattcggcctagagtgcgagcaagaagggggcaagccactgatcctcacagtattgcagagaggttacgtagagaaagaatagctgaaagaatgaaggcactacaggaactggttcctagttccaacaagactgatagggcagctatgcttgatgaaattgttgattatgttaaatttctaaggctccaggtcaaggttttgagcatgagcagactgggaggagctggtgcagtagcacagcttgtggctgacattccactttcatcagctgagggcggagccagtgaaggtggcagtaatcagccagcatgggagaaatggtctacagatggcacagaacatcaagtagcaaagctcatggaagaagatgttggagctgccatgcaattcctccaatctaaagcactttgcatcatgcccatttcacttgcctctgcaatataccacgaccaaccacccgatgcctccacaatgatcaaacccgaacctaatgcaccttcataaaatgaaaaggatacatgcaattggacgtgcccatgaacaactccaaacttacaactatcccaccttccatttgttccccccacgtcagacttagtcaactcccctcagcattgcaatcaaagtcagatgccatattattcgttctgcctttcatttttttcgtcaaataggttgtaatgtgatgcctagaaaaataatcataggtactcctgatgtggtgtgggatagtggtggatagccagaacactttccggtggggacccttcttttggatagtggagggtggggcatttttaaagggggaagatgggtacatagacatgattaatgtattagaaggaaactgaaaagggaattgaaatggatattggatagttgttggtcgcttaaaaaagttgtgttggaaggttgcactactcggttttgagtgggttgtgttttttgtaaagtgcttgatttatttttctcaagtatctctgagtcat

SEQ ID NO: 334 - DNA, 931 bp, Aquilegia vulgaris
tcaactgctgttggcagttgtaatggggctgtgaagctcgtgtgagagctcgcaggggtcaagcaacggatccacacagtattgctgaaaggcttcgaagagagaaaatagcagagaggatgaagaatctacaagaacttgttccaaactctaataagacggataaagcatctatgcttgatgaaatcattgagtatgtcaggtttcttcagcttcaagtcaaggttctaagcatgagcaggctgggggcaacaggggcagttgttcccctcattacagaaaatcagcctgagggatctactagtcattttctgtcgcagtcagctggtcgagatgttaaacatattgaatctcctaacacccttacatttgagcaagaagtagtgaagctgatggaatccaacatgaccaaagctatgcaatttctgcagagaaaaggcctctgcctaatgcctattgcccttgcagctgccatttccggtagtaaagcaccacccgcctctctttctactgagggaaagaagtctattttgaccaatggctttgttcatcataacagtgggcaatctaacattgggccaggtcagatatcatctgatggagagactagatcagaggaaaacataattgggattcacagcagagaagacttttcaagcaacagctgcagtgggaccagcattaaaaaagagggaacaaacaccacaaacttcaccagagaaatgaatcaagagtagacatagttttgccggtctcaatctttgtggcttcatacctggtctccaattctcaagtttcagtaacctagcaagtagataagtagcagagtctgggactgttttgttttttttttctcgcttcaaagatgagaatgtggtatagatttctaattatacgttataggtttcattgtacatgcacacatatatgc

SEQ ID NO: 335 - DNA, 838 bp, Brasssica napus
cccacgcgtccgaaacaccttccgatgacttcttcgagcaaatcctcggtctccccaacttctcagcctcttcatccgacggcgggttaggcggaggaggagcaccgccgatgatgctgcagctgggctccggcgaggaaggaggtcacatgggtgggctaggaggaggaagtgggtttcacaaccagatgtttcctctaggtttgagtcttgaacaaggcaaaggacaaggctttcttagacccgaaggtggtagtcttggaactgggaaacgtttctctgatgacgtcatgaaacccgtttttcatgggcagccaatgcaacaacagccagctccagcggcgccgcatcagcctacatcgatccgtcccagggttcgagctaggcgtggtcaggctactgacccacatagcatagctgaaaggcttcgtagggaaagaatagcggagcggatcagggcgttgcaagagcttgtacctactgttaacaagacagatagagctgctatgattgatgagattgtggattatgtaaagtttctcaggctccaagttaaggttttgagcatgagtcgtcttggtggagccggtgcaggtgctccacttgttactgatatgcctttgtcatcatcagttgaggatgaatctggtgaaggtggaagggcaccacaacctgcgtgggagaaatggtctaacgatggcactgaacgccaagtcgctaaactgatggaagaaaacgttggagcagcgatgcagcttctttcatctaaggcgctttgtatgatgccaatctcattggctatggctatttaccattctcagcctccagatacaacttc

SEQ ID NO: 336 - DNA, 1291 bp, Citrus clementina
caaccgtgttacaccgacccatctgctgctgcttcaaactccgctgatgacatacccatgttcctacagctgggctccggcggcccttctcctggtgccggaggaggcgccaccagtgctgctgacataagaagtttggctatgggaatcagcatgggaatgatgcctctagggttaaatttggagcatagcttcttaaggcagcatgaagatcataatagtaaccataacaacaacaacaacactaatgcttcttcttcttctcctaataattcttctgccacttctggaatcaacgagagagattccgtgcacatgccaagtttgtttccagcgtttggacagttgcaaagtcaatcagcccggccgccgctgccacgtcctcctcaagtacagcagtttcagagccaaccagcagccgcaccgcagcctccagctgtccgtccaagggtgcgagcaagacgagggcaagccacggatcctcacagcattgccgagcggttgcgtagggaaagaattgcggatagaatgagggctctgcaagagctggttcctagctgcaacaagacggatagggcagccatgcttgatgaaatcgtggattacgtgaagtttctaaggcttcaggtcaaggttttgagcatgagtagactgggtgcagctggtgccgtggctcagcttgtagctgatgttcctctgtcatcagctcttgagggagagagcattgatggtggaagcagtcagccagaatgggagaaatggtcaaatgacggaactgaacaacaagtagccaagctaatggaagaagacattggagctgctatgcagttccttcaatccaaggcactttgcatcatgcccatatcacttgccagtgcaatctatcgcacccgtcaaccggatgccccagcattcgtcaagcctgaatcgagcaccccttcatattgtctaaacaacaattggagtcagcagttggctcacaatgactcaaaatatttaatcacgggtacctattcctatagaatacttttggtcctcttatccaaccaaataattcaaattccaatgcaacgttcccattcttctttcccttaattaacctagggcaaaaaagggaaatgaaaagaaggcaatgggcaatggcaagggggaaaaaggggaatttttttccaaagttttttttttttataaaaactccccttttcaaaaaaaattataaagggggggggggggttttttaggggggggggaaaaaacccccaaaaaaggttttcggggggtgttttatatg

SEQ ID NO: 337 - DNA, 1344 bp, Curcuma longa
gcacccgttgagacctaaccttccccgggaaactggcggctgtgcctatgcaaccgagcagcaaagagacggaaaggatggcgcagtcccacgccgccctccagctggagctccagaacggcggcggaggcgcccagaacgacgatttcttcgagcagacgatgtccggcttctccaccgccgcctgggcaccggagttggggacccccaggtcgcttttcggggcgcggtcttcggaggagtcgccggacgacgagggattgaactacgccccaccgtacggtgggtcgtctcttctcgcctcgcggcaccggatgcacctcggcacctcgccggcggattcgtcgatgtttctccagctcggtgggcagattctgttacatcctacggccggcgcctccgggggcgagtccgggggcttcctccggttgcccctctccctcggtagcggaggctctggggtctcgacttctgccatcttcggcgacagatcccgaggagaaatcgacccgccgttcgaatcgtccaatcccaccgaggctgaggtgttgtataacgacggattcaccggatcgcttccacgggcggtgcaagcgtcccttcatcagcaactcctccgacaaccccagaactacggagctgctacgctgaccggacaggctcttgcgataacagcaacggcttcaggtaccgccggcgcaggtactgcgccacccaagccgagggtgagggccagaagaggtcaagcgaccgatccccatagcattgccgaaagacttcggagggagagaatcgcagagcgtatgaaagctctgcaggaattggtgcccaacgctaacaagacggacaaggcgtcgatgctggacgagatcatcgactaccttaaatttctccagctccaagtcaaggtcttgagcatgagcagattgggcggagcagccgccgtcgccccgctcgtcgctgacatgtcttcagagagcggcggcggagcgggaacgccgaggagtaataacgatggcctgacggcggcggagcagcaggtggcgaagttgctggaggaggacatgggttcagcgatgcagtacctgcaggggaaaggcctctgcctcatgcccatctccctcgcctccgccatctcctccgccacctgccgtcctcggcctccccccggtgtcaacctccgctacccggcagccggcgacgcgcctccgtcgccgagcatatcggcgctgacagtccaatcgtccaacgccggcagcgccggcgccgacgccagctaggatggagctgttcgttaagatcgctgtccaaaaagtgcttggaattggaatttcaatccttagt

SEQ ID NO: 338 - DNA, 1235 bp, Citrus paradisi hybrid
cgactttgccgagtcaaactcatggcgaacaacccgaacgaagcctcctcgactgacgatttcctcgagcaaatcctcggaattcctaatttcggttctgcggagtccggcttggcggctagcgatggcggcttggctgcaggctcgccgatgatgctgcagctgagctccggcgacggctccagccacatctcggctctcggaggcggagtaagtagtgggtatcatgggcaggtgtttccgttaggcttgagcttggagcaaggtaaaggaggatttttgaagcccgaggaagcctctggaagcggaaagcggtttcctgaagaacatgctataaaaaatgtttttcatggccaaccactgccctcacctgttcctgcagctccacatccaccagcaatgcgccccagggtgcgagctagaagaggacaggccactgatccacacagcattgctgaacgtctacgaagagaaagaatagcagaaagaattagggcactgcaggagctggtccctagtgtcaacaagactgatcgagcagccatgcttgatgaaattgtggattatgtgaagtttttgaggcttcaagtgaaggttttgagtatgagtagagtgggcgctcctggcgctgtggctccactggtaacaaccgacctcccactatcatcagtcgaggatgaatctggtgaaggggtaagaaaccaaccagcctgggagaaatggtcaaatgatggcacagagcgacaggtagctaagctcatggaagaaaatgttggggctgccatgcagttccttcaatcaaaggctctttgcataatgccgatctcactggccacggcaatttaccattcgcagccaccggaatgaagaggtaggatggataatggttggttgtttgaaaatgcttagtgttttcccagtccaacataaaatgatagtgcttgctttgtcgaggaggcgtgggctttgttttcaaaaagtaatttgacttctttctcattttctcctgagtcattcattattggagggcgacggggctgctgacgatggctgatggctgatggcattggtattggtggactgcgtttggtataaattacttacgtatttgaacttaacctgattttcaattctaaagtcatttactgcggtacaaaatttgaaaaatctattactgaatttagttgataataaccaacttagcgtgttcctttcggggatcatccatccaactc

SEQ ID NO: 339 - DNA, 1916 bp, Citrus sinesis
ggggaaacaccaaattccttctctccctctctctccctctctctctctcttcttcctgttctcacctatttagtatttaacatccatcagaagaatggtttccattctcttgaagaaactcttgactcttcaaacttaaatttccatatcgtaaagacttattctcaagaaattaagatgcagccctgcagcagcggcggagaaatgcaaggaatcagctcgctcttgagcaacggaagccacgagcagcagtcgcagatccatcaaagcgcgacgtttgatccaacttcgcaagacgacttcttagagcaaatgctatcctctctcccatcgtgttcttggactgacttgaagtctccctggggggttgttgaccttaaccctaataacaataataataatattaacaacaagcagcccagagacttatccgacgaaacggcgccgtccactactcaagagaataatgtccctgcagggtttcagttcgacgagtccatgattttagcttccaagatgagacagcatcagatcagcgggaatactgggagtgggaataataattctgctgcagcaaagtttatgatgcagcagcagcagcaacaaatcatgatggctgctgctagaggtggcatcgggttgcctttatcacttggaaatggtggcgataacgacatcgttgatgtctcgtcattcaagtcccaacagggaggagatggctcagtgcaagcactctacaatggcttcactggatctttgcatggctcaacccagcctcaacattttcatcatcttcagggaggatcgatgcccgggcagacctttggggcaccagggccggttatgaaccagacgcaggctcaggcaagtgggtcaaccggtggtggtggtggtggtggaaacacacccgctcagcagcctaaacaaagggttagggctaggagaggtcaagctactgaccctcacagcatagctgaaagattgcgcagagagagaattgcagagagaatgaaagctcttcaagaacttgtacctaatgccaacaagacagataaggcttcgatgctggatgagatcattgactatgtcaaattcctccagctgcaagtgaaggtcctgagcatgagtagattgggcggtgctgctgctgtcgcaccccttgttgctgatatgtcctcagagggaggaggaggtgattgtatccaagcaaacgggcggaaccctaacggagctcagacgacgtcagctaacgacagcttaactgtgacggaacaccaagtggctaagctgatggaagaagatatggggtcagccatgcagtacttacaaggcaaagggctttgtctaatgcccatctcacttgcaactgctatatcgactgccacgtgtcactctaggaaccccatcatcagcaccagcaacaacaacaataacaacggcaatccccaccacaatcctttgcttcagtccaatggtgagggcccgacctcacctagcatgtcagtgctgactgtccagtcagcaactatgggtaacggtggggctgacggctccgtcaaagatgctgcttccgtttccaagccttgatcaacggcgtcgaccgactttatgatgcggctcgtccaaagtctacgaaaataaggcgtcactagatgttggaccttcacgacgtcgtatttgtgtagactttgtgactgaatctaacaaacaacaaaaaagcaagaaagaagccaatcccaagaacaaaaaccttattttatgttattattattattttaatttgcgggttaggttttgttaattttactattattaaatttttaatttctcagatgggatatctccctctttttcttttatttaatattctctgtcatgattctctattaaataattatttacaaaagcctttaatc

SEQ ID NO: 340 - DNA, 1835 bp, Eucalyptus grandis
agcactttcacttatcagaggccgaaagcaaaaccccctgaacacttcaaagaaaagaggttttttcagacaccctctcgccctctctctctctctctctctgagctgagagacaataccagcttataaaacccgagacccataaaacctcccatcggaattcccgaatcacgttaccgggtcatcgggtttcggatctgccacccagttcaccaacaccaccaccaccaccttccttccccccctcctttttgggtttcccaatgagcacatctcacctccacttcctccctccccttcccttaaacattctctcccaccaataatttccacattggcaaccaatttcttattcatcatcccctccccgagtcccaccaaccttaggctctctctctctctctctctctgccactcaatctttccacttagaaagaaaccaactttttgctgggtttcgcatagagcagaaaacccatcgtagactttgatctccagttgacacttctatagagaaagggagatagagtggagagagagagagagagtttataatcatcggcttatggcaggctcaaatccgcaggaaggactgggggatgagttctttgagcagatcttggccgtgccgcccggagcttactccggtggctccacgcccatggtcttgcaactcggctccggccgcggcggcgtggaagatggcggcggcagaggaggcggcggggggctgaggggcatgggggtgatgatgcccctggggctgaatttggagcaaggtggattgtttaggcacgaggatgttgagaacagtactagtgcatcttccaccacttctgccatcaatatggagagagaagcaggagtccaccacggcaacaacatgacaagctgcttgtttccagcatttggacagttccagactcatcagtcagtccagccacctcctccccatccaccccctcctcaacttcacccggccttcttgaatcagcccgcagtgggatcgccgaaccagccggcgatacgcccaagggcacgagctagacgagggcaagccacggatcctcacagcatcgctgagcggttgcgccgagaaagaattaatgaaagaatgaaggcgttgcaggagttggttcccagttgcaacaagacggatagagcagccatgcttgatgaaatcgtggattacgtgaagttcttgagactccaagtcaaggtcctaagcatgagtagattgggcggagctggtgctgtggctcaacttgtagctgatgtacccctctcatcagctgagggcgagatcatcgaaggcgggaacaatcaaccggcgtgggagaagtggttgacagacggcacagagcagcaagtggctaagctgatggaagaagatgttggggctgcaatgcagttcctccagtccaagacgctctgcatcatgcccatttcgctcgcctccgcaatcttccgcacaagccaaccagacatgccccggtccatcaagcccgaatccagcgccccttcctgaagcaccctgaacaagttcctggcgacatcatagttgcaacaatgcctaggtttctcaggtctgaccggttcgaggttgtccccaagtcgacgtaactcctttgccaaccaagttgcttagtgccctctgttcatagttcactgtcgctgtcttagagtgggtgtgaacttgtggttctcatgccttaattacaacctaaaaaaatgcatcagtttcatgttttttccaattcatccaaggaaaagtcaaaagcaactttattccaaattcagcttattaaaacctatcttctgatgaaaaaaaaaaa

SEQ ID NO: 341 - DNA, 1765 bp, Eucalyptus grandis
cctcctcgcgtccctctgcgttccgccagctaaccgaaattccggccacccccgccggagctccgccgtgaaaccctctctccgtctccgcctccgcctccgcctccgtctccgtcgcttccttccgccgtcgcgaccgtagatagatgcccttcccgcccgctcatggcgaacaacccgagtgacggcgccagcgacgagttcctggagcacctcctcggcctccccaacttcgctgccgcggcggaggccggcctcgccccgggcgacgggaccggcctgtccgtcaccgcggccaccccgatgatgctccagctcggctccggcgacggctccggcggccacggccacggccacggccacggccatggccaaggccacttgtcggccctcggcggcgggggagcgggggcggggggcggcggtggcggcggtggcggggggtaccatggggcggtgttcccgctggggctgagcttggagcaggggaagggagggttcctgaagcccgaggaggcgtccgggagcggcaagcggtaccccgaggaggtcgtcgacggcagagcttcgactgtgaaaaacctgcactccccgttgcccaacttcccagatgtttcgcaaatggcttcttttaggaaccgagatgtgtttcatggacaaccagtgcccaaccctgttcctgcagcaccacatccaccagcaatgcgcccgagagtaagggctagacgaggacaagctacagatccccacagcatcgctgaacgattgcggagagagagaatagcagaaaggattcgacaattgcaagatctggttccaagtgttaacaagacagatagagctgccatgcttgatgaaattgtggactatgtgaagttcctgaggctccaagttaaggttttaagcatgagcagattgggcgcagctggtgcagtggccccacttgtgaccgacatcccactatcatcagtcgaggaagaaggcggtgaaggtggaagaaaccagccagcgtgggaaaagtggtcgaatgacggcacggagcggcaagttgctaagctcatggaggagaatgttggcgccgcaatgcagttccttcaatccaaggctctctgcatcatgccaatctctctagccaccgcgatctaccaaactcaaccgcccgacacctcctcccttgtcaagtctgaaagcaatccaccatcctagaccagccacaacacaggcacctcccctttttccaggtcccaccaaaggctcaagacttaaatgctccttggtccccgctttagtttgtcccgtttctacaccttcaaaaaccagttgatggcccttcttccttcctcaaattgcaatcaaagtcagatgccatagcccttgcttttctgccctctctttaagcttttcgcccggacaggttcaatgtcaatgcctaataaaatactagcaggcccttcatgtcttgccaagttcaactaaaggagagatattcaaaccctcacttgatatgctctctctctctctctctctctctctctctctctctctctctctctctctctctctctctctctaccaatagaatatgcttagtggagaatgatgtgagcgactttatagtgggtgggggctcttgtttttcttggtagtgggtcgtgggaccttgtaaaagggattggttgtgtaaagtaccatttgtataatgtaatgcgtaatgtgttcgatgagggggaatggattgcttggtagaaaattgagaaaaaaaaaa

SEQ ID NO: 342 - DNA, 796 bp, Gossypium hirsutum
cgatagtggtggtggtgggtttagaggaataggcatgatgcctttagggttgaatttggaacatggattcttaagacatgaagatggagttgtagttgacaacaacaacaacaatgcttcttgttcagctgcttctgctgtttctggaatcagtgagagagattctatgcatatggtaagcttgtttccaccttttggacaaatgcaaactcagcaaatccgcgcttcaccgccacctcctcagcctccaccgcagctccaccagccatttcacagccagccaacatcaggtccagttgctgctgcaccgcacccacctgccgtccgtccaagggtacgggctaggcgaggacaggcaacggatccccacagtattgctgagcggttgcgtagagaaagaatagctgaaagaatgaaggctttgcaagagttggttcctagctgcaataagacggatagggccgctatgcttgatgaaattgtggattatgtgaagtttcttagacttcaagttaaggttctgagcatgagcagactcggtgcagcaggtgcggtggctcagcttgttgccgatgtacccctactatccgttgagggtgatggtgcaggaggtggaacccagcctccttgggagaaatggtcaaacgatggcactgaacagcaagtcgctaagctgatggaagaagacatcggagctgccatgcagtttcttcagtcccaggcactttgcatcgtgccgatatcactggcatctgcgatcttccctgcacatcaacctgatgcaccaacaatcgtc

SEQ ID NO: 343 - DNA, 918 bp, Gossypium hirsutum
atgataagcaatggaggtgaatcttctgagtttcggagatcatttacaggcttggaaactctttctccaattccacaattatggcatctacaaccttatgactctgtttcttcccttcccactttggtgggacaaaccatagtagatgatgaaggcaatattaacagatttattgagattgatgaaattctgcaacctgagaacttatctgcttccatcaattcaaagggacaacaggacatgcaaaattccttttgctcttcttttcccgctgaccaccctataacaaagaccatgattgggttgccatctctggtgcagggtgcatcgcctaacctgaacaatggttccgaccgaactgtgaagcctcgagtaagggcacgtcgaggtcaggctactgatccacacagcattgcagagaggcttcgaagagagaagattgctgaaagaatgaaaaacctgcaagaacttgtacctaattccaataagacagacaaagcctctatacttgatgaaatcatagggtatgtcaagtttcttcaactccaagtcaaggtactaagcatgagcaggcttggggcagcagctgcagttgttcctctcatcactgatggtcgagctgaggtatctaatggtttatcacttgcaccattagcgggtcaaggggttgatttttcaccatctcctgatcaagttgttttcgaacaagaagtggtgaagctcatggaatccaatatgacaatggccatgcaatatctacaaagtaaaggtttctgtcttatgcctgttgcacttgctgctgccatatccaatgttaagtcatccacatcctcatcgtcatcatcagttcctgcttctgatgagagtaagaaacttgggcttcaccaacagtactctaatcaacaacacctgcagcag

SEQ ID NO: 344 - DNA, 1530 bp, Gossypium hirsutum
aaaaacccaacactctttttcattcctctgtttttctctctcccactttccgtttctctttcagaaaaaggaaagttcaagctaagctaaaactctgaactttccccttctcagtctcctcagggacagagaaagattaaacgaaaggaaaagaaaaagacttcttctttttttccctaaaagaaaagttgatctttttttgtttggttcgattctctttagccatttcctttttgcatgtagatgctctttggtagccttaactcgccacttcgactcacttcaatccatggctaataaccccaacgagtcccccgctgatgatttcctcgagcaaatcctcggactctcccactttgcgcctactgagactggcttagcggggcccgacggtagattgtctggaaacgccacgacggctggagcgccaatgcttctgcagctcagctccggcggtggcaccggacacatcggcgctataggcggcggtggaggcggtgcgtttcacggacaggtttttccattgggattgagcttggagcaaggaaaaggtgggtttttgaagcccgaggaagcatccggtagcagcaagcgcttccgcaacgaggtcgttgatggcagagctttttctgttaaaaacgttttccatggacaaccagtgccagctactgttgctgctggaccacatccaccagcaatgcatccgagggtgagggctagacgaggacaggccacagatccacatagcattgctgagcggttgcgcagggagagaattgccgaaagaatccgggcattgcaggaacttgttcctagtgttaacaagactgatagagcagccatgcttgatgaaattgtagattatgtgaagttcctgaggctccaagttaaggtcttgagcatgagtaggttgggcgcagctggtgcagtggcaccactcgtaacggacctcccactatcgtcagttgaggatgaaagtggtgagggaggaagaagccaaccagcctgggagaaatggtcaaatgatggcacagagagacaagtagctaagctgatggaagaagatgtcggagctgccatgcaattccttcaatcaaaggctctttgcgtcatgccaatttcactggccaccgcaatttaccatacgcaatctccggatacctcctctgttgttaagccggaaacaaatcctccttcatagacacctcacatgagaaaaagaggaaaagaaaacggtgtatcatatggtgggggagactgtggacaaagacggaagcacttttcttgtgtagtgatggggcatggatttttgggtttggtgggatgagggacccgcaaaaggagatggatgagatgagtatatttacatattataacaataaaatattacaatattgatagtgttagtgtaagtaacagtgtaatttcacaggaaagggctaaagtagaagaagggataatggttggctgattttataaaatgctgattcaataaaatagatggattggttcacgtttcaaaaaaaacct

SEQ ID NO: 345 - DNA, 1561 bp, Gossypium hirsutum
aaaaaaagaagaggaaagccaaaactccaaactttctattttgcttttatattatatttttttttggttcaattcagtttcgccatttcctttgcatgtagatgctctttggttagtccctaacgccgctacttggactcactttccgctgctatcttttttccggctttctcatggctaataacaccaacgaggcccccgccgccgatgatttcctcgagcaaatcctcggcctccctaactttgcgccctccgaaacgggcttagctggatccgacgctggattggctgcaaccgctgctggagctggagctccaatgtttttgcagctcagctccggtgatggcgccgctcatatcggtggaatcggcggcggtggaggcggtgcgtttcatgggcaggttttccccttgggcttgagcttggagcaagggaaaggcgggtttttgaaacccgaggaagcttccggtagtgggaagcggtttcggaacggggtcgttgatgaccgagcttcttctgtaaaaaatgttttccatggccaacccatgcaagcaactgtttctgcagcaccacatccaccgacaatgcgtccaagggtgcgcgctagacgaggacaggccacggatcctcacagcattgctgaacggttgcgcagggagagaattactgaaagaatcagggcattgcaggaacttgttcctagtgttaacaagactgatagggcagtcatgcttgatgaaattgtagattatgtcaagttcctgaggcttcaagttaaggttttgagcatgagtaggttgggcggagctggtgcagtggcaccgcttgtaacagacattccactatcatcagtagagtatgaaagcggtgagggtggaagaagccagccagcatgggagaagtggtcaaatgatggcacagagcaacaggtagctaagctgatggaagaaaacgttggagctgccatgcaattcctccaatcaaagtctctttgcattatgcctatctcactagccactgcaatttaccacacacaggtaccagatacctcctctgttgttaagccagaaacaaatcctcctgcatagacctgaggggaaaaaaagggtaggcatcccacagtccatccttcatcccgccttttatttgtcctattctaacacacccactccctccctctctggcttgaaaatgccatcaaagtcagatgccatagctcttgctttttgccttcctttccagctctttttcgatttttcaaaacagggtttgatgtcaatgccttaaaaaaatcagagacaggcaattgatgtctcgacaagttcgagtaaaggggaagaattgtcaaatttcacttgatatgctcttcttttttgtatcaaaatgggatagtggacaatgatgggagcacttttgtagtggggctctgattttgtggttagtggattgtgggacctgcaaaaaaaaaaaaaaggatagagatgatccagggtataatattgttattgtaacaatgtattttgaagataaaatcgaatgcaaaagtagaagaattgatatt

SEQ ID NO: 346 - DNA, 1411 bp, Gossypium hirsutum
aaaaaatccctttgaaaaaaaaaattccctcttttcctttctgttactttcacagagctgaaagtacagaacagaaaagaaaccccaaacctcaaaattttctctttctcacgttgatagaaggatttaagctagaacggcaaagatatgaaataatatcgtgttttttgtctataaatattttgttgggttttcaattcttttttcgccatttcttttgcatgttgatgatctttggtggctttaactcggtacttggactcacttccgctactacttcttcgggtttcacatggctaataaccccaacgaggcttccgctgatgatttcctcgagcaaatcctcggattccctaacttcgcgccttctgagacgggtttggcgggacccgacggtggactgacaggaacaactgctggtgccggaacgccaatgtttctacagctcagctctggtgatggagccagtcatctcggcggaatcggcggcggtggaggcggcgcgtttcccggacaggtttttccgttggggttgagcttagaccaagggaaaagcggcgggttcttgaagccggaggaaggttctggtggtagcagcaggcggtttcgcgatgaagtcgttgatggcagggcttcctcagttaaaaacgttttccatggttcaccaatgccggctaccgttgctccatcaccgcatccaccaacaatgcgtccaagggtgcgggctagacgaggacaggccacggacccgcatagcattgctgaacggttgcggagggaaagaattgccgaaagaatccgagcattacaggaacttgttcctagtgttaacaagactgatagagcggtcatgcttgatgaaattgtagattatgtcaagttcctgaggctccaagttaaggttttgagtatgagtaggttaggcggggcgggggcagtggcaccgcttgttacagacatcccattatcatcggtcgaggacgaaagcggcgacggtggaaggaaccaaccggcatgggagaaatggtcaaacgacggcaccgagcgacaagtagccaagctcatggaagaaaacgtaggagctgccatgcaattccttaaatcaaaagctctttgcattatgccaatctcactagccaccgccatctaccactcgcaaccactggatacctcttctatcgtcaagcccgaaacagatcccccaccataactctaacaaacaaaaaataagggtatgcatcccacacagcccatcctatatgtccaacactatgaggaaaaaaaaaggaagggggggccttcatgtccggatttgtcaatggtgatctcttttgtagtcaatggtgggggtaggggataatgatggaagaagaggggcactctcatagtgggggctttaaatttttttgtt

SEQ ID NO: 347 - DNA, 1526 bp, Gossypium hirsutum
caaaaagaaaaaaagagaaactcgtcccttcatcttcaatctcattcatcatcaaagcaaaaaaaaaaccctaattatgcagccttgtagtcgtgaaatgcaagcaatgaactctctcttaaacccgacccaacaaatccctctccaagaccttcaaatcaacggtaacagacaccaccatcaacagatccacgtcccatcatcatcgcagttccagtatcccacacccacttcaacaacccaccatgacgacagcttcttagaacagatactctcctccaccacgtccttcccgtggtccgacgaaacgggtcctcccaaccccgaggataacaataacgccggcttcaactacgatgagatggttctagcttccaagcttcgacagcatcaaatcaacggcggagctgctggtaacccttttgccgctatgaagatgatgttgatgatgcaacaacaacaacagcaacagcagatgatgttagcgggaagacccacggttgcctccgccgccgccggaggcggaatcaccaccaatcatcagggtggagagggttccatgcaagctttgtataatgtttttggcgatggatctttgcatggaactatgcaggcgaaaagctttgtgggggctaattcagcaacagagatgacccaaagtcagggaagtggtccgacggccggagaagcggtgacggcgccggaaaagcctaaacaaagagttagggcaaggaggggtcaagctactgacccccacagtatcgcggaaagactacgtagagttagaattgcagagagaatgaaagctcttcaagaactggttcccaacgccaacaagacagataaagcttcaatgcttgatgagatcatcgactatgtcaaattcctccagctccaagtgaaggttctgagtatgagcagattgggtggtgctgctgctgttgctccccttgtttctgagggaggtggcgattgtattcaaacaagtgccaatggtgggtcccatccacgaaattccaacggcgaccaaacgccgtcggccaacgacagactgacgatgacggagcaccaagtggccaagcttatggaagaggacatgggctccgccatgcagtatctgcaagagaagggtctgtgcctcatgccgatctctctcgccaccgccatctcaagcgccacgtctcgttcaaggaaccccatgatcaaccatgaaaacccggccaacggcagccaccttttgattcaatcaagcggcggcgatggaccttcctcgcctagcatgtccgtgttgacagtccagtcagccaccatgggtaacggtggccttgaaggtggcgcagcctcggtttccaagccctgataacggcggtgactgacatacgtagagaggaattgaagggaaacagcttttagtctatgagaataaggcggtcttcttcccaagtattttcttaaaagtacgaaacgacgccgtatttgacgtagacttataagctaacccctaagactgacctcatccaatcaac

SEQ ID NO: 348 - DNA, 1052 bp, Glycine max
ggattcatgaagcccgacgaagcctccgctagcggaaagcgctttcgcgacgacgtcgttgataatagagctaagcatgtttttcatgggcaacccatgcctactactatgcctgctgctcctcatcctccagcaatacgtcctagggtgcgggccataagaggacaggctacagatccacacagcatagctgaacgattgcgcagagaaagaatagcagaaagaatcagggcattgcaagaactggttccaagtgtcaacaagacagatagagctgccatgttagatgaaattgtggattatgtcaagttcttaaggcttcaagtgaaggttttgagcatgagtagactgggtggagccggtgcagtggcaccactggtaactgacatcccattatcatcagtcgaggaagaaggtggtgaaggtgcgcgaaaccggccagcatgggacaagtggtcaaatgatggcacagaaagacaggtagctaagcttatggaagaaaacgttggggctgccatgcagtttcttcaatcaaaggctctctgcatcatgccaatctcactggcatcggcaatataccagtcacaaccaccggacacttctagcatagtcaagcctgaaactaatcctccttcatagacctaattcacatgttgcacaatctattattattggtcccatcccaggctcacctaatacttgctgggacccacacctaacgcgttatttgtctgttccaaatccccccccataaaataagtcattggcaagcatcaagttgcaatcaaagtcagatgccataattcttcctttttttgcctttctttcagcttttgtcaatacagggttcgatatcaatgccttggaaaagacaagcaaacccctatatcatgtcttgccgtatttcaagtagagaggaagacattgtcaaaagttcaattgatatgcgcttcttttctagtgtcaaatgggtgggggtagtggaccatgatgtaggcgcttttatagtggggcttagtttttgtagtgggctgtgggaccttctaaaaggt

SEQ ID NO: 349 - DNA, 1490 bp, Glycine max
gtccaacaacaacaacgacgctactactaatgtcgcatctttttcctccttcgatgagcactccaccttagcctccaagttccgcaaccaccagatcagctccaataacaacgcgcccaaaaacgccgcggcggcggctctcatgctccaacaccaactcctcagagactctggtcttctcaacatgcctctttccttgcccggaaacgacgtcgtggttgacgcttctaccttcgaatcccccaatccgagtggtaaagcttcagtccaaactctctacaacgggttcgccggatctctgcatggcgtaggccaatcctcgaaccagactcaacattttcaacaccctcagggaagttcgaatccgatgcaagggcaaaattttggggcggtgccagctggtggtggtagcgcgacgaatcaggctccagcgagtggcgctgccgcgggtggcgcgccggctcagccgaggcagagggttcgagcgaggagaggtcaagccacggacccacacagcatcgctgaaaggttacgtagggagagaatcgccgagagaatgaaggccctacaagaactggttcccaatgccaacaagacagacaaggcatccatgctagatgagatcatcgattacgtgaagttcctgcagctccaagtcaaggttctgagcatgagcagattgggcggtgctgctgctgtcgctccccttgttgctgatatgtcctctgagggaggcggagactgcattcaagccaacggcaagagtaacggcggtggggcccaggcttcaaccaccaacaccaacaccaaccaaacgacagcgacaacaacctcaaacgatagcctaacgatgacggagcaccaggtcgcgaaactaatggaagaagacatgggttcggctatgcagtatcttcaaggaaaaggtctttgcctcatgccaatttcacttgccactgcaatctccactgccacgtgtcccaccaggaacgttaacgttaaccccttgatcaacgccgccgccggagccacccattttccgaccgcagccaaccccgccggcgaagggccgtcgtctccgagcatgtccgtactgacggtgcagtccgccatcgcaggcaacgacggcgccgcctccgtttcgaagccgtgatgacggtgtttgagtgactttataggaaaaagaagaaaaaaacaaagtgaacaaaggacagaaaatgacgtgtgtttttttttcttaaaaaaaaaggagccgttaaagtctacgaaaataaggcgtcagggatacggaggactcgacgacgccgtatttacctagactttgtttggctgatgctaactttcaaccaaccaattacaaactccaccatgccaattacctacttcttcgtcttctttttctttattattattgttaattgttaactgtcgctttgggtttcttctgttcattgtttttaaaaatctggagtggaatttctctttttggtgtt

SEQ ID NO: 350 - DNA, 1850 bp, Glycine max
ttttcttcttccttttcgtgctctctctcaaattcaacacgagagacacaaaacaaaacattctcgggaagcgtaaccgcccagaattccgaccattttcacagaccttgttttctgctcttgatgtttttcaccccccaaatgtggcaataaaaaacgggtggcttaatttgacacaatcggtggttattgcaaagttgagatggcaggtaatagtggttcagaggggttgggcgatgatttcttcgaacagatcttagcagtgcctgaagccggcacagtgggaatgttgcaattggggtccacaactggtgctttcagaggagcttctgggttaatgcctctgggcttgaatttggaacaagctgccttcctaagacaccaagttaacgttgacgacgacgttgttcatgttaatgttgatgatgccaccatccaccaacatcacctcactctccataacaacaacaactcctcatcaccctcttccactgcaccaatcaccgatagggattctatgcatatgaggggtttattttccgcgtttggacaactgcatactcctatccgccccacgctgccattgcctccaccacctcgtcagccacaactccacctccaccatcataaccaatttcagggccaggcagctgcagctccagcgtcaatggctgctatgccacaaccacctgggatccgccctcgtgtgagagcaagaagagggcaagctacagatcctcacagtattgctgagcggttgcgtcgtgaaagaatcgctgaaagaatgaaggcattgcaggaattagttcccagcatcaataagacggacagagcggcgatgcttgatgaaattgtggactatgtgaagttccttaggcttcaggttaaggtcctgagcatgagtagactgggtggagctggtgctgttgctcagcttgtggctgatgttcccctttctgcagtggagggggatcaggacatagaaggtggagccaatgagcaagcctgggacaagtggtccaatgatggcacagaacaacaggtggctaagcttatggaagaagatgtgggagcagctatgcaatttcttcagtccaaggcactttgtatcatgcccatatctctagcctcagccatttttcgtatgcctcaatcagaagcatcaacaggcatcaagcctgaatctaacagtcactgatattagcgatagaaccgaaacaaaaagtatcatgacagacactagataattaaatttcttcatccttaatttatgacaagggtaatattctactttcttgtataatttaattttcctgattggatggagaaggatctagtcggtgcagcagctggttcactcttctcaagttttgtcaaagaaggagtaattgttattcctattaagtaaaatcggaggagccaagcaaatgtccttttcatggtgaagattaatattttcaatggccttattcaagtttttcttgcaaatatctgtggtggggttggtggtggatgaccaaaatatttgtagtggaacctcttttcttggtttagtatttttagtcagtggggagtgggaccatttaaaaggaaaggatggttacgaatgatgtatcgggagaaaactttaatacaagttgaattataatatggttagttaccttgtaaagatgttttggaagcatctgaccattggaaaagctaaagatattttaaaataatcacacattttgagtcttgtttgcttctaaaacaagtgatttccagcacaaaattaggtgagagtactgaaccgactgcttgctgagaaagtggaaaatgacagtttgttaatttactgaacaaaaaaa

SEQ ID NO: 351 - DNA, 1392 bp, Glycine max
cgcgtccgctccgccgacgcctctccgatgatgcttcagctcaactccggcgacgccgccacccacctagcctccttccacgcgccgccctaccagctcggcctcagcctggaccaaggtgagggacccttcctcacgcctgaggacgcttctggaagcggcaagcgcttccgcgacgacgccgttgataccagacctaacaacgtttttgatgggcaacccatgcctacaactgttcctactgctccacatccaccagcagtgcgacctagagtgcgggctagaagaggacaggctacagatccacatagtatagctgaaaggttgcgcagagagagaatagcagaaagaatcagggctttgcaagaactggtccctagtgtcaacaagacagatagagctgccatgctggacgaaattgtggattatgtcaagttcttgaggcttcaagtgaaggttttgagcatgagtagattgggtggagctggtgcagtggcaccactggtaactgatatcccattatcgtcagtcgaggaagaaggcggtgagggaagaaaccagccagcctgggagaagtggtcaaatgatggcacagaaagacaggtagccaagcttatggaagaaaatgtgggtgctgccatgcagtttcttcaatcaaaagcactctgcatcatgcccgtctcactagcttcagcaatataccagtcacaaccctcaggcacttctagtatagttaagcctgaaactaatcctccttcataatcatagtcagaactctggcacagatgcaccatccagtggtcccatcaagggctcacctaacactgctaggacccacgtgtaatttgcctgtttcaaacccccttaaccttagtcattggttcgcatcaagttgcattcaaggttggatgccatagtctttcctttttgtcgttctttcaacttttttgtctagacagggtttgatgtcaatgcccttcaaaacacaagcaaaccccatcttgataaatttcatgtaaagggaaagaaattgtcgaagttcacttgatatgctcttcctttttgtatcaattagtgggggttagtggaacgtgatggaagcgcttttatagtggggcttggttttttgtagtgggcagtgggaccttctaaaaggttagggtggtgtgtatattttattagtgatgtaactcttagggaatttgaattgcagagctgaaatggataatgattgctttaacaatgctgggtgctgctagtccaccagaaaatgatattgctttttttttttttatttcaggtgtgctctagttagttatttaaaagtactttcgaccccttttttctcatgcagggagagatggaaggagagtatggtgctattttaaacca

SEQ ID NO: 352 - DNA, 1497 bp, Gossypium raimondii
ttcctttgtttttctttctctcacttcccgtttctctttcagaaaaaggaaagttcaagctaagctaaaactctgaactttccccttctcagtctcctcagggacagagaaagattaaacgaaaggaaaagaaaaagacttcttctttttttccctaaaagaaaagttgatctttttttgtttggttcgattctctttagccatttcctttttgcatgtagatgctctttggtagccttaactcgccacttcgactcacttcaatccatggctaataaccccaacgagtcccccgctgacgatttcctcgagcaaatcctcggactctcccactttgcgcctactgagactggcttagcggggcccgacggtagattgtctggaaacgccacgacggctggagcgccaatgcttctgcagctcagctccggcggtggcaccggacacatcggcgctataggcggcggtggaggcggtgcgtttcacggacaggtttttccattgggattgagcttggagcaaggaaaaggtgggtttttgaagcccgaggaagcatccggtagcagcaagcgcttccgcaacgaggtcgttgatggcagagctttttctgttaaaaacgttttccatggacaaccagtgccagctactgttgctgctggaccacatccaccagcaatgcgtccgagggtgagggctagacgaggacaggccacagatccacatagcattgctgagcggttgcgcagggagagaattgccgaaagaatccgggcattgcaggaacttgttcctagtgttaacaagactgatagagcagcaatgcttgatgaaattgtagattatgtgaagttcctgaggctccaagttaaggtcttgagcatgagtaggttgggcgcagctggtgcagtggcaccactcgtaacggacctcccactatcgtcagttgaggatgaaagtggcgagggaggaagaagccaaccagcctgggagaaatggtcaaatgatggcacagagagacaagtagctaagctgatggaagaagatgtcggagctgccatgcaattccttcaatcaaaggctctttgcgtcatgccaatttcactggccactgcaatttaccacacgcaatctccggatacctcctctgttgttaagccggaaacaaatcctccttcatagacacctcacatgagaaaaagaggaaaagaaaacggtgtatcatatggtgggggagactgtggacaaagacggaagcacttttcttgtgtagtgatggggcatggatttttgggtttggtgggatgtgggacccgcaaaaggagatggatgagatgagtatatttacatattataacaataaaatattacaatattgatagtgttagtgtaagtaacagtgtaatttcacagggaagggctaaagtagaagaagggataatggttggctgattttataaaatgctgattgaataaaatagatggattggttcacgtttc

SEQ ID NO: 353 - DNA, 1301 bp, Helianthus petiolaris
cggggatctcatcttttcactcttcttccctctctctctctctcttctttctctctctaggttttaggattcgccggcgatacgcttctccggcaggcatgtcgactgacccgccggagggctacggtgacgactttctcgaacaaattctcgcgattccgtcgtacaacatcaccggatgcttacctgttaataccgctgattctactggctctgaaacagtttccgttcatcatcaacaacaacaaccgcaacaacaactgcaaccgcaaaagtttccgttaggtttgagtttagataacggccgtgaaacaatcggaggagcgtttgcaggacagcaacagcaactgcagcagcagcagcagcgtgagagaggagggagcatgaatatgagtggtttgtttcctcagtttgagaatttgcagtcacactcgctgttacatactgttccacagggttttcaagggcagccaactagcagtacagcagtgactgtgcctcatccgcctacgattcgccctagggtacgagctcgacgaggacaagctacagatcctcatagcatagctgagcgtctacgccgagaaagaattgcagaaagaatgagggctttgcaggagcttgttcccagctgcaacaagactgataaggctgctatgcttgacgagattctggattatgtgaagttcttacgactccaggtcaaggttcttagcatgagtaggctgggtggagctggtgcagtggcacagctcgtatctgatgtcccgttgcaatctgttgagggggacgggagtgaaaatggatataataatcaacagcagggccaggcagcgtgggagaattggtcaaacgacgacacagaacgtgaagtagcaaagctgatggaagaggatgttggggcggccatgcaattcctgcagtcaaaagcattatgcatcatgcccatttcacttgcttcactaatctaccctaatcaccaacctgatgttaaacccgagccatctgctccttcttagagagcatcttacatgcttctctcttataacaactactactactactacctttttctgtcatttggttttgtgccccaaccccaacccgatgtcttctctaattgatggacattttgtatgaggaaagtaggaaggaaacaggggatgtgtatggccatctcattgtgtcctggggattttatttattatctagattaaaatgtattctaagaaaatctcttcacatggacaaccctacccaacttagctgtgtttattattgttaatatctaaatgatttgg

SEQ ID NO: 354 - DNA, 713 bp, Hordeum vulgare
cgggcaggcgaccgatccccacagcatcgcagagaggctaagaagagagaggatagcggaaaggatgagggccctacaggaattggtccccaatacgaacaagactgatagggcagttatgctagatgagatcctggattatgtgaaattccttaggcttcaagtaaaggttttaagcatgagcagattgggtggtgctggtgctgttgcacagcttgtttctgacattccactttcagttaagggggaagcaagcgatagtgggggcaaacagcagatatgggaaaagtggtcaacggatggcacggagaaacaggttgcgaagctgatggacgaggacatcggtgctgcaatgcaatttctccaatccaaggcgctctgcatgatgccagtctctcttgccatggctatctatgacacacaacattcacaggacggccaaccagtgaagcctgaacccaacaacactgcctagtatagtaacagcagctgcaagccgcatccctgcagctgctagtaggcatgcatgaacctaccatcaaagtgttaagatgaaaactgctggttttgatccactaacaacaaggaggcaggaaaagacctaaaagatcctctccactggaagttgtatcgacggtatatgatgtcacctactaccccttttccatcttttgttcaaaggtgctttaattttcaaggatatggtaagcaat

SEQ ID NO: 355 - DNA, 934 bp, Lactuca perennis
tttcaccctcctcatacgcccactacgcttcttccttctaaaccagactacgattctccggcatggcgacagacccgccggagggctacggagacgacttccttgaacaaattctcgcgattccttcttacaacatcgccggatgcttgcctggtaataccaccgatgctaatgcttctgaaacggtgtctgttcatcgtcaacagcaacagcagcaaccggtttttccgttaggtttgagtcttgataatggccgtgaaacaatcggagcgtttgcagggcagcagcagcagagggagagaggagggagtatgaacatgactggattgtttccttcatttgaaaatttgcagtcacattcgctgcttcattctgttcctcaggcttttcaagggcaatcaactaccagtacagctgtcactgttccccatccaccttctattcgccctagggtccgggcccgcagaggacaagccacagatcctcatagcatagctgagcgtctacgccgagaaagaattgcagaaagaatgcgggctttgcaggaacttgttcctagctgcaacaagacggataaggctgcaatgcttgatgaaattcttgattatgttaagttcttacggcttcaggtcaaggttcttagcatgagtaggctgggtggagctggtgcagtggcacaactcgtatctgacgtccccttacaatccgtggagggggacacgagtgaaaacggatataatcaacccgcatgggaaaactggtcaaacgatgacacagaacgtgaagtagcaaagctcatggaagaaagatgtgggggccgctatgcaatttctccaatcaaaagctctatgcatcatgcccatatcacttgcttcactaatttacccgccccaaacacccgactccaattcccatgttaagcccgaaactgtcg

SEQ ID NO: 356 - DNA, 948 bp, Nicotinana benthamiana
tagccggagataatctccggcatggcgacaaaccaaccggagggctatgccgacgatttcctcgagcaaattctcgcgattccttcctacgctggcttgccgccggtggctgacgtgggaacttcatcagaaacgacgtcgttcacttcggcatctgctgctggtctacagcaaccgttgttcccgctgggactaagcttggaaaacggccgtgatgacgtcagcgatgctggtgcttatgcagtgaagcatgaaagagaaggaataaatatcgggaatttatatgcgggtctagaacatttgcaatctcatgcggttcgtcacgctgtgcctcctgttcaccatatccagtctttccaaggccaaccaacaacaagcacaacgatgactgtaccgcactcaccagcaattcgtcctagggttcgagctcggaggggacaagccacagatccacatagcatagctgagaggttgagaagagagaggatatcagaaagaataaaggctttgcaagaacttgtccccagctgcaataagacagatagggctgctatgcttgatgagattctggactatgtgaagttcctaaggcttcaagttaaggtattgagcatgagtaggctgggaggagccagtgcagtggcacaacttgttgctgacattccgttgcaatctatggagggggacagtgctgaaagtaaatccaaccagcatatctgggaaaagtggtccaatgttgacacagaacaagaggttgctaagctcatggaggaagatgttggtgcagccatgcaataccttcagtccaaatcactctgcatcatgcccatatcacttgctgcacttatctatcctactcagcaaccggatgacatgtccatggtcaagccggaaccggcagccccgtcatagacctccaatttattgcacgtgcctctgagaactcct

SEQ ID NO: 357 - DNA, 1792 bp, Nicotinana benthamiana
cttctttatttctctcttctccacaaaatcatctatttctaaattgagtcatatacttgcacagaagttactaaagatataatgcaagccatgaaccagtacgatccgacgtcgtctcacgacgatttcctcgaccaaattctctcttccgttccttcttcttcactttgttggcctgacctttccaaatcctgggacccacaccaccaccacctctctccgccgctgcctcctaaccctagctccggcgatgaccaccagcttcctccttctaatcctcttcagcatttccaatatgacgaccagtcttcttctttccttgctgccaagctccgccagcaccagatcactggtggtggtggtggcggcggcgatgctgtagcagctgctaaagcacttttgctccagcagcaacttttgctttctagaacactagccggaaacggccttaggtctccgactggagcctccggcgataacggcttcctgaacatgctcggtaatggtgaccaaaacgacagcgtcggaaatccggctaatgacagttccgttcaagctcttttcaacggattcactggatctcttggtcaaaactcaagtcaacctcaacattttctccatcctcagggaggaaggatgcaagcgcagagtttcggagctccggcaacggcgccggcgatgaatcaaactccggcagcaagtggttcagctggtggaggtacaacgccggcggcacagccaaagcaacagcgagtgagagctcgtagaggacaagcaactgatcctcacagtattgctgaacgattacgtagagagagaattgcagagagaatgaaggctttgcaggagctggtacccaatgccaataagacggacaaggcttcaatgctggatgagatcatcgactatgtcaaattcctacagctccaagtcaaagttctgagtatgagcagattgggtggtgctgcagctgttgctcccctagttgctgatatgtcctctgagggaagaggagaaggaaatggaggaaggggaggaaacggaacggcgtcgtcttcaaacaatgacagtatgacggtaacggagcaccaggtggctaaactaatggaggaggatatgggttcagcaatgcaatatctacaagggaaaggcttatgcctaatgccaatttccttagctacagctatttcaactgccacgtgtcactccaggaatcccatgatccctaacggcaacggtggcaacaacccactactaggcggaggaggaggcctcgccaccaacggcggtggtggcgaggctggtggaccatcctctcctaagttgtcggttttgactgtccagtcagccacgattggtaacggtggaattgatccctccgttaaagacgctacttctgtttttgaagcttaagaagtttgtttggaagttttttaacggcgttaactgtttcactgaccccctttgccacggagaaaaaagaaaatgtgaaaaatagtgcgtggccgtcaaagttaagtctaccaaaataagggtcttttagtctttatttttatcttttttccagtttcatatgaaaaaaaaaaaagaagaagagagaaccaagaacgacgccgtatttaggtagacttggctgaagtaagcttaacttaagctaacagcaggaaatgccaatggaaatgaagtacttatgtttcttttaatcttttctccataatgatgatcctttgatttccctgttctacttaagtttttccttaatggagtattgtttggaaaggatatatatata

SEQ ID NO: 358 - DNA, 1484 bp, Nicotinana benthamiana
gatctctcattcattaacggggaaaagaaatgcaagctatgaactcacaaatgtcactacaagaagaaaatggagcttcgtcgggccaaaatatgagtcactctcattttgacccgacgtcgtctcacgatgactttcttcaacagattctctcttccgttccttcttcctctccctggccggacctctccagcggcggtgacggtcattttgacgaccagtcaattttcgtagcttccaagctccggcagaatcagatcaccggcggtggtggcggtggcgcagctgctaaagcgttgatgcttcaacagcagcttttgctttctagaggattactcgccggtaatggtgaccaaaatgatgacgttggaaatccggaaaatgagatttcagttcaagctctttacaatggattcgctggatctcttggtcaaacctctaatcaacctcagcattttcaccatgctcagggaggatccatgcaagcgcagagtttcggagcaccggcgtcgtcgacaatgaatcaaacgccggcggcgagtggtggttcagctggtggagggcagccaaagcaacagaaagttagggctcggagaggacaagcaactgaccctcacagcattgctgaaagattacggagagaaagaattgctgagagaatgaagtcgttgcaggagttggtacccaatgctaataagacagacaaggcttcaatgttagatgagatcatcgactatgtcagattcctccagcttcaagtcaaagttctgagtatgagtagattgggtggtgctgcagctgttgctcccctagttgctgatcggtcctctgaggggggaggaggtgattgtgcacaagcaaatggaggagggaggggcagtaatggaacgacgtcgttagctaacaatgacagcatgacgatgacggaacaccaggtggcaaagctaatggaggaggatatgggatcagccatgcaatacttacaaggaaaaggcttatgtcttatgccaatttctttagccacagctatttccaccgccacgtgtcactccatgaaactcaacaacccactactacacggcggcggaagcggaggctctgccgccatcaacggcggtggtggtggaccatcctctcctagcttgtcggcttccactgtccagtcagccacgatgggtaacgggggcgcttgagtttgttgaaatatacttcgtaatttacgacgttgactgtttcaattatcttttcttagaaaaataccggaaaaatgtgaaaaaagtggtgaaaatttcgttattttagagctgaaatttcaaggccttttcacatgggacaaaaaagaaaaagaaaagaaaaaaggggtaattgaaatgtttagctctaaatattattggtaatttctgattttagttcgtgtgatattttattaattgtatttaacattgaattaatgataatatgggtgtttttgtttatttacatat

SEQ ID NO: 359 - DNA, 1500 bp, Nicotinana benthamiana
gaaatatttaaacaattgcttttatttggtaaccctattggacaatatatttattaatcaaagcttttggtgacaccatttgctttttattttcttcatcgctctcactgttctatagaaagtagcagcaaccaaataataaacacatagaaacactcaaaacacacacttccatttcttttcctatatatatacacaagtacactcgtgagtagtactgagtactagtttgtacatctaatattacacatgttaaaaaaacacttactagtaattgcttttctgagaaattaaggtggtcgagaaaaaaaatctgttacagctatggctaacaacccatcagaaggtcctgatgatttctttgaccaaatcttgggattcccagcttataacggagcagaaaccaatttggcgggaagtgatgccggagcaattccgccggcgatgctgctgcagctaaactccggcgatgcgtcgggtcagttttccggaatgggtcttggtgttggactaggtggtggtggtgggttccatcatccatctcagtccggttcttttccattggggttgagtttagagggagggaaaagtggattcatgaagatggatgatgttccggccgtacccggaaggagatttagagatgatgttgttgatagcagagcttcttcttctgttaaacctggttttcatggccaaccgatgccttcaatgccacatcccccagcaatacgtccaagggtaagagcaaggcgaggacaagctactgatccacacagcattgcagagaggttacgtagagagaggatagcagaaagaattagagcattgcaagagttggttcccaatgtcaataagaccgatagagccataatgcttgatgaaattgtagattatgtcaagttcctacgcctgcaagtgaaggtgttgagtatgagtaggttgggaggagctgctgcagtggcaccacttgttacagaaattccaatatcatcagtagaggaagagatcagtgaaggtggaaataatcaaccagcctgggaaaagtggtcaagtgatggtacagaaaggcaagtggccaaacttatggaagaaaatgttggttctgcaatgcaatttcttcagtctaaggcactctgtattatgcctatttctcttgcatcagcaatttaccactctcaaccaccagatacatcaagtcttattaagccagaaactaatcctccttcttagagatccttattagaaagctggctcggacatcacgtttaattttttttaaaaagaaaaagatccttattaaaaaggtgacaacatgcaaatgaccctgagaattttctttgggagtggatggtcccacagctatttttacttattaagtagtactatttagctttgttgaaagacacggttcaatgttatgtataaagtaacctttttttttgtgattgatatgatatataattcaagcagaagaagaaaaattgtcaaagttctgcc

SEQ ID NO: 360 - DNA, 1451 bp, Nicotiana tabacum
aaaacagagtcattccattccatttccgttcctcaaaaccctttattaacttcttctcgccgggaaaaacccttttcctcgccggagataatctccggcatggcgacaaaccaaccggggggctatgccgacgatttcctcgagcaaattctcgcgattccttcctacgctggcttgccgccagtagctgacgtcggaacttcatcagaaacgacgtcgttcacttcgtcatctgttgctgctgctggtctacagcaaccgttgttcccgttgggactaagcttggataacggccgtgatgacgtcagcgatgctggtgcttatgctgtgaagcatgaaagagaaggaataaatatcgggaatttatatgcaggtctagaacatttgcaatctcatgcagttcgtcacgctgtgcctcctgttcaccatatccagcctttccaaggccaaccaacaacaagcacaacagtaactgtaccgcacccaccagcaattcgtcctagggttcgagctcggaggggacaagccacagatccacatagcatagctgagaggttgagaagagagaggatatcagaaagaataaaggctttgcaagaacttgtccccagctgcaataagaccgatagggccgcaatgcttgatgagattctggactatgtgaagttcttaaggcttcaagttaaggtattgagcatgagtaggctgggaggagccagtgcagtggcacaactggttgctgacattccgttgcaatctgtggagggggacagtgccgaaagtagatccaaccagcatatctgggaaaagtggtccaatgtcgacacagaacaagaggtcgctaagctcatggaggaagatgttggagcagccatgcaataccttcagtccaaatcactctgcatcatgcccatatcacttgctgcacttatctatcctactcagcaaccggatgacccgtcaatggtcaagccggaaccggcagccccgtcatagacctccaatttgttgcacgtgcctctgagaactcctaatagccttgtgtcttaccctcctttgtatccttacctactatcacttgtattttcctctgcaattggtggcaatgcaatcaatgtcagatgccacaatttttgcttttagcccaaccattggccccttttattacctttccggagttttcgtcaaacaaggcatgatgtcataccttgggcaaaggtaaacgtctgaaagcacccaatccattatcatcattttggatgaggtgagcagctttttcaaagttatctatgattagctgctcttctgccattttgtttgtgggatagtggggactcctttatcttttgcatagtggattggtggggcgatgtaaaagtaatcaactggttgttgtaaagtgtaatgtaatttaagtatattattgcaatggatagttgatgtggctctcc

SEQ ID NO: 361 - DNA, 2056 bp, Oryza sativa
gacgcgagtcgagagacgggagagcagtgcagtgcagtgcagtgccgcctcgtcttccttccctccctcctcatactctctctcctcccggtcttctcctcccccgcccaaagcggagcgcggcggttatatatatatatatatatacagcacttcctcctccttcctcgccgcacgtcgccctccgacttcgcctcgtcagccgtcgtcaccgcccccacccgtggattgcaccggagatcggaatgggcggcttcgcctaccccttcacgccgtcgccggcgtggtcgcgggacgccgtgttcgctggctcgccgtgggccgcaggcggcgtctcctccctcgccgacgctttggtgagctacggtgccgtcgacgacgaggaggccgcgttcctcggcaagaccgccgcgtcgtctcccagtacggcgaggctgcacgagcagcagcagctgctgctggaggctgagctgctgcgccacggcgacggcctcggcttcgccgcgatggacgacgacggcggcgccgcgatgctcggcgcgctggagccgtgcgccatgccgctcaccgacagcggcggccccccggtcatctgcagcagcagctccaacgacagcagcgggagcgagcactccgccgccatgcctgcaggaggcggcttcctcgtcggagagcagcagcagcacgtgccgccggcggcctacgccgcgggaggtgtactcccgtccatggccgcgggagaagaaacgccgcagagcttcggctttggcagcctcttcaatggcgatctcctgcaggaggcgaccgtgagcaagtatcatcatcatcagcagcagcagcagctgggcgttgtgccttcgtcgcagccgcatcatctgaatgatgacatcgatttcaacactggaaaattgatgtcttttgcttctggacagcagcacgttacccccagcattgacagcctgcagatcgaccagaaggaattcagcagtggcctgcaccacctcaatctctcctcgctgatttctggaccactcgcatcattcaatgcaacacagagccatagacagcctgctgaagcttgcggtggcaaaaatggcggcgccgctccatttgtgaacctatctgaggtgctaccaaagggcaatgggagtggtagtgctgggaatggagcacccaagcctcgtgtcagggctcgccgaggccaggccaccgatccccacagcatcgcagagaggctccggagggagaagatctctgacaggatgaaggatttacaggagcttgtcccaaactcaaacaagactaacaaggcatccatgctcgatgagatcatcgactatgtgaaatttctccaattacaagtcaaggtccttagcatgagcaggcttggagcggccgaagccgttgtccctcttctgacagaaacacaaaccgagagccccgggtttctcctgtccccaagatcatcatcaggagaaaggcaggcaggagcaggagcagtaacaggagggctccccggcgatcagccggagctcctggacggcggcgccatgttcgagcaggaggtggtgaagctgatggaggacaacatgacgacggcgatgcagtacctgcagagcaaggggctctgcctcatgccggtggcgctggcgtcggcgatatcggcacagaaggggacgtcctcggccgccgtccgaccggagaagaagaagaacggtgatggcgatggcggcggcgacgaggaggacgtgaagggagagtttgacgcaccgaggaggcctcctgtcggccggccgaaggagatgaggtccagagtctaagctagaacctctgctttgttcaggagagatggagcttaatttagatcctaacactttgctacttatatgtttattattatgaaattttaattgcaagttgcaactggtgatctcgaactacattttgccggtgattagaaaattgttatatggaggttagttattaaatcatatataattatattttgtattgttgcggtccttgcggacaatgccattcagtaccttgatatttg

SEQ ID NO: 362 - DNA, 1326 bp, Oryza sativa
atgcaacccaacgcccgccaaatgcgcggcggcggcggcggcggcggcggcgggcaggacgacttcttcgaccagatgctgtccacgctgccggcggtgtggtccgagctcggctccggcaagcccgcctgggacctcacggccggcgccgtaggaggaggaggaggagcctccgatgaccactccgccgcggcgttcgacgactccgcgctcctcgcctcccgcctccgccagcaccagatcgacggtggaggcgacaagcccatcatgctccaactcagcgacctccaccgtcatcacggcctcgccgccggcgatgacagcggcggcgctgccgggttccttcccctgtcgctgttcgctgaccggtcgcaggacgacatcgacgccgccttcaagtcccccaatggcgctagaggtgaccatgcgctgtacaatgggttcggggccgccggaatgcatggcgccgccgccatgcagccgccgccgttcgggcagggaggatcaatgccggcgcagagcttcggtggcggagcggccgcgagcggcggcggcggcggcgggtcggcgtcggcggcagcggcggctggggcatcgtcgggcggaggggcggcggcgccgccgcggcagcggcagcgggcgaggagagggcaagccactgacccacacagcatcgccgaacgtctccggagggagaggatagctgagaggatgaaggcgttgcaggagctggtcccaaatgccaacaagaccgacaaggcatcgatgctcgacgagatcattgattatgtgaagttcctccagctccaagtcaaggttctcagcatgagcagattggggggagcttctgcagtcgcgcctctagtggctaacatgtcatcagagagtaatgggaatggcaatgccaccagcagcagcgggaacggcgaggcggccaatggcagcagcaacggcgacaacaatggtggcggcacactgcgggtgacggagcagcaggtggcgaagctgatggaggaggacatgggctccgccatgcagtacctgcaggggaaggggctatgcctgatgccgatctctctcgcaacggccatctcctccgccacctcctcgtcgctcctcccccgcactgggggaggcgctggagggtccctacatgaaggtggtaatggtacatcaccaccattggtgaatggcaccgccaccggatgtgacgacgccggagtattcttttctgttaaatttgtcgtggagctgtcgtttctcctgctgaatgaagactgtagaggtaaggaggaatcgaaattattggtccagaagggaccctga

SEQ ID NO: 363 - DNA, 1831 bp, Oryza sativa
acctcgcttcacactagccgaggagacgcgagcgcgagctgctctcctctcctcccgccccgcgtcgccgacgtcgaggcggcggtcgacgtcgacgtcgccggggatggccgggcagcagccgcagcagcagggcccaccggaggacgactttttcgaccagttcttctccctgaccagctccttccctggcgccgcgccgggcggccgcgccgccggtgaccagcccttctccctcgcgctcagcctcgacgccgccgcggcggccgaggcgtccgggagcgggaagaggctcggggtcggcgatgacgccgagggtggcggcagcaaggcggatcgggagaccgtgcagctcaccggactcttcccgccggtgttcggcggcggcggcgtgcagccgccgaacctccgccccaccccgcctacccaggtgttccacccgcagcagtcgaagcagggcggagcagccgtcgggccgcagccgccggcgccgaggccgaaggtgcgagcgcggcgtgggcaggcgaccgacccccacagcatcgcggagaggctaagaagagagagaatagcagaaaggatgagggccctacaggaattggtccccaatacaaacaagacagatagggcagctatgctagatgagatccttgattatgtgaaattcctgaggctgcaagtaaaggttttaagcatgagcaggctgggtggcgcgggtgctgttgcacagctggttgctgatattccactttcagttaagggggaagcaagcgatagtgggggcaaccaacagatttgggaaaagtggtcaacggatggcacagaaagacaggtagcgaagctgatggaagaagacatcggggcagcgatgcaatttctccaatccaaagcactctgcatgatgccaatctcgctcgccatggcaatctatgacacacaacaaacacaggatggacaaccagtgaagcacgaacccaacactccttcctagtatagtaatagcaactgtaagtctgtaacatgaatcgttacaacccctagtagacatcaacctatcaaagtgtaagataaaacagctcgttttgattcactaacaaggaggcaggaaaagacctaagagatcctctccacttgaagttgtaccaatggtatatgatgtcacctttcgttatcatcttttgttcaaaggtgctttgattgcaaggatatggtaagcaatagcctgctcatcctcctacacctttcaatgcccctatgagcgcgggtgattgagagagctactaaagagtctggcatgctctcacattgtctcttttcgagtctgtagtgcaccaaccatacactttgtggtggggactgcttttttggtagtgggtgtttggactaatcaaaagggattgatgtatgcctgtgtctgcagcctgcacaatggttgacggaatttgaacacaagatgaaatggaagatgattttgatggtgatgttcatttatctccatttttccaaagtggaggcggaggctttggtcaatggaggctgagcgtgcgctaagctgatcgctagtgggtctgctatctacatctacatgcactactgttgtatctattgtgacatactcttgataagaaactgcggtataaagtttaatctttctattggcgattaatccatagaattactttgtattttctgccatgagttctcaactacccacattatttgtgaagaacagctgttcttgtactgttcactgccctctaccacagggtttcctgagtttgtggacaaattgtgagaatctacagcaaggactattgagtttttttttgtc

SEQ ID NO: 364 - DNA, 1104 bp, Oryza sativa
atgcagccgagcagccgcgacacggtcgccggcggcggcggcgaggggacgcaggatgacttcttcgaccagatgctctccacgctgccgtcggcgtgggccgacctggggggcggcggcggcggcgcggcggggaagtcgccgtgggaggtcgatccggcagcggcggcggcggcgtcgcaggtgttcgacgagtcggcgctgctcgcgtcccgcctccggcatcaccagatcggtggggctggcggcggcgggggagagaagccggtgatgctgcagctgagcgagctgcaccggcaggccggcggcggcgaggaggacgggagcggcgcgttctcgccgctgccgctgttcacggaccggacgaacgtgccgccgcgggaggagatggagggcggcttcaagtcgcccaatgccgccgccggaggcgagcacgcgctgttcaacgggttcggcgtgcacggcggcagcggcggcgccgggcagccgccgttcggccagcttcggagggagaggatagcggagcggatgaaatcgctgcaggagctagtcccaaacgccaacaagacggacaaggcgtcgatgctggacgagatcatcgactacgtcaagttcctgcagctccaagtcaaggttctcagcatgagccggctcggcggcgccgccggcatggcgccgctggtggcgagcatgtcgtcggaggggaacagcaacgggagcagcaatggcggcggtggcaaggcgagcaagggcggcaccggcggcgagggcggcggcggcggcggaggaggaggaggaggtggcaccggtggtgggatgcgggtgacggagcagcaggtggcgaagatgatggaggaggacatgggcacggcgatgcagtacctgcaggggaaggggctctgtctgatgccgatctccctcgcctccgccatctcgtcggcgacctcatcggcgtcgctcctctcccgcccgtccatccgccacgccggcgcgccgccgcagacgatgctcgatgccgccggcccgacctcgccggcggcgatgtctaacggcgatgacccacggcacgcaaaggcggacggcggcgccggcgggacgcaatga

SEQ ID NO: 365 - DNA, 2221 bp, Oryza sativa
agaaggggtgtactagtaaacaaaacaaaaagaataggttgagactttcctgctatcgtcagcattttcagcccccctcccctgggctggctctgcatcatcattcatcatcagcagcagtcagtccatccaacgcgtcttcagtcctcacccgcagcaagaaagccacacttttcctcctcctcctcctcctcctcctccgcctcttcctcttcctcccccttcgttctccacacccactctcgggctgcggcttctccggcttccgcgcctcttcctctgtcgggttaacaaagttactttcagcgtcagagggtatttcgtacaaaaaggaactgctgttggtacaggattatcagctgtgaacactttctgtttctagaggccattctctgtaacactttggagcatcaattttgtagcgtgctatcatggactactctgctggttcctacatgtggcctggcaattcaggttctgagaactataattttgttgacggttcgtcggaatcatatgcagaagaaggaagcctaccaccttcaggctatttcatgggagctggatcagatcgcagtttaaagatcacggagaatgaaaggaaccccactatgcttgcaaatggatgcttgccatacaacacccaggctcatccattatctggccagattctacctaagggtgagctccctaacaatcttctggatcttcaacagctacagaacagcagcaatctgcgaagcaattcaattcccccaggggttcttcagtgcaattcaacatctggaacatttgatgcgaaattggatacacctggtcttgcagaactgcctcatgctttgtccagttcaattgatagcaatggtagtgacatttctgcttttcttgctgatgtgcatgccgtttcttcagccccgacgttgtgttcagcattccaaaacgtttcctccttcatggaaccagtaaatctagatgctttcggtttccaaggggcacaaaatgttgctatgttgaacaaaacaagtcttccaaatgggaatccctcgctgtttgataatgctgccatagcatcactacatgatagcaaagagtttctcaatggtggttccatcccttcgtttggtactgtcctgcaggcactaggagcgggtggtttgaaggctgctcaacaggagcaaaatatccggaatatacctctccctacattcacatctggtagtcatttggcagttactgatgcacaagggccaccacttccttcaaagataccaccattgatccatgaccataatagtgagtaccctattaaccattcttctgatgtggaaccccaagcaaattcagctcctggaaatagtgccaatgcgaagccacgtacaagggctcgccgtggacaggcaactgatcctcacagtattgctgaacggcttcgccgagagaaaatttcagaaaggatgaaaaatctccaagtccttgtcccaaactccaataaggcagataaggcatcaatgcttgatgaaataattgattatgtgaaatttcttcagcttcaggtcaaggtattgagcatgagcaggctaggagctcctggagcagttcttccccttcttagggaatctcaaaccgagtgccatagtaatccatctctatcagcttcaaccatttcacaagggccaccagacatgccagactcagaagacagctctgcctttgagcaagaggtagtgaagctgatggaaacgagcatcatcagcgcgatgcagtatcttcagaacaagggtctctgcctgatgcccattgctctcgcttcggccatatccaaccagaaaggcatggctgctgctgctgcaatccctcctgaaaaatgaaaaaaaaaatgaaatcggaaaaatatggggggaacaactgcagaagacataataactcaacggctgcagaaatgtgctggacactgcaggttttgtgaatgaagtgaaatccaatccagggggtcataaaacataggaagttatctgactaattcaggcttatgacacaatctactctatagtctatagctattgtgtgcctgttgcacatcagttgatgtgtattcttttgttttttttgtattgcatccggatgctaattaggtagtagtgtttcctttgatgtacatgagtattatctatgcggttttatctaatgtgcatataaagtaaaatctggtatgttgctgcta

SEQ ID NO: 366 - DNA, 1500 bp, Oryza sativa
atggctgcggcggcggcggcgggccagatctccctggacgacctccgcaacggcggcggggtcgccgccaatgccggcggcggcggcggcgtccacgacgacttcctcgaccagatgctcagcagcctgccgccctcggcgtggcccgacctcgccgccgggaaggcggccgaggacgacgccgaggggatgcatcaccaccaccaccagcagcagcagcagtttggtgggccgtacgacgagtcggcgatgctggcgtcgcggctccggcagcaccagatcagcggcggcggaggaggaggcggcggtggcgcggccgccgtgaagcagatggtgctgcagcagctcgccgatctgaggcaggggcaccacatgatgctccagggcttggggggacggtcgccggcggggggcggcggcggcggcggcgacgggggccttctcctcccgctcaccctcggcagcggcggatcgggcggcgacgtgcaggcgttgctcaaggccgccgcggccaattccgccggaggaggagacgccggcggcgtctacggcggcggattcgccggctcgctccatcaacagcagcaacatttccagccacatccacagacggcgccgacgattccgacgcagagcttcggcggcggcggcggcggaggaggaggaggaaccgcgtcaggcggcggggcggcgcagcctcaggccggcgcggctggaggaggcgcgccggcgccgccgcggcagcgggtgcgggcacggcgaggccaggccaccgacccccacagcatcgccgagcggcttcggagggagaggatcgccgagaggatgaaggcactgcaagaactggttcccaacgccaacaagttgatgcagacggacaaggcttccatgctggacgagatcatcgactacgtcaagttcctacaactccaagtcaaggcaagcacgtacactaaattactaatacatgttttgagcatgagccggttaggtggcgccgcagccgtcgcgccgctcgtggccgacatgtcctcggaggggcgaggcggcggcgcggcgaacggcggagcaccggcggcggcggggagcgatagcctgacggtgacggagcagcaggtggccaagctgatggaggaggacatgggcaccgccatgcagtacctgcaggggaagggcctctgcctcatgccgatctccctcgcgtccgccatctcctcggcgacgtgccatctccggccgccggtggtcgccgccgcgcagcagttcccggccgggctcggcgccgccgctgccgccgcgcaccaccaccaactgagcgcggcggcggcggcggcggccatgcgcggacacctgcccggcctgaacgccgacggctccgtgccggcctcgccgagcatgtcggtgctcacggcgcagtcggccatggccaacggcggcgggggcgccgccgacggcgaggggtcgcagctcaaggacgccgcctccgtctccaagccgtga

SEQ ID NO: 367 - DNA, 411 bp, Oryza sativa
atgagggccctgcaggacttggtccccaacacaaacaagacagacagggcagctatgctagacgaaatccttgattatgtgaagtttcttcggcttcaagtaaaggttctgagtatgagcaggctgggtggtgctggtgcagttgcgcagctggttgctgatattccaatctcagttaagggggaggcaagtgacagtgggagcaaacaacagatttgggaaaagtggtcaaccgatggcacagaaaagcaggtagcgaagctgatggaagaagacatcggagcagcaatgcaattcctccaatccaaagcactatgcatgatgccaatctctcttgcgatggcgatctatgacacacagcattcgcaggacggacactcagtgaagcctgaacccaacactccttcatag

SEQ ID NO: 368 - DNA, 913 bp, Picea abies
  misc_feature (804)..(809): n is a, c, g, or t
  misc_feature (858)..(862): n is a, c, g, or t
  misc_feature (875)..(882): n is a, c, g, or t
  misc_feature (886)..(893): n is a, c, g, or t
cacaggaggcagctgtaacggcagcgacggaggaatgcttcctcttcctctcagtcttggtcaggctggaaagtccggcgacatgaacgagcccggatcgcgggaagaaattgaagcttctttcaagtcggtaaataatgcccgagattcgaacctcggagggctattccagccgttcgccgtatcaccgcggggcgttcgaccgaccggtcaaaacttccatgcgcagcccggacaagtgccattgcaagggtatggtggaatgccccaacctcagcatcagaatccacctccgaccggagttggtgctgcaccacctgttcgacctagagtaagggcacgccgtggacaggctacagatccccacagtattgcagaacgattgcgtagggagaggattgcagagagaatgaaggctctgcaagaactggttcctaattccaataagacggataaggcttctatgctggatgaaataattgattacgtcaagtttcttcagctgcaagtgaaggttctaagcatgagtcgactgggaggtgcaggagcagttgctccccttgtggctgatatacctgctgagggtgccaacgccccacaaggcacaagaaccaacggtagccagaactcttctccggacggtctagcattaacagaacgccaagtagcaaagctaatggaagaagacatgggaacggccatgcagtatcttcagggaaaaggtctctgtctgatgcctatatctctggcctctgccattaataactccggttcgagaccccaggctccttccaccccttctcnnnnnngactattggcatctaatgttaacgacaggcaggtactcgaaccctcctnnnnntcggcactatctnnnnnnnnctcnnnnnnnnatgacatacagccatccatc

SEQ ID NO: 369 - DNA, 1266 bp, Populus deltoides
attacggccggggggtactcctcactagtcactggctacctgtgctcgtattagaaagcaaaccaaagcaaagcgaaaagctgaaaccttgaaagccgaagtacttagctataaagaaaaagagaaaaagaaagaaagaagaaggtaacccaacagtccttaactctctcaattaaaacgattttgcatgtaaattgatgctattttgtatccccaactctctatctcaactcacttcgactcctccgagtccaactccaaatggccaataatccaaccgaacctccagccgacgatttcctccaggaaatcctcgggatgcctaactttgcttcggctgaagccgggttggttggagccgatgctggcctggctggcgccgctgctgctcaagcttctatgatgcttcagcttagctctggtgatggttccggccacatctccgaccttggcggtgctcctggaggaggaagcgccgggtttcacggctttcccttggggcttagcttggagcaagggaagggagggtttctgaagcccgaggaggcgtctgggagtggaaaaaggttccgtgatgagattgttgatggtagagcgaaaaatgtttttcatggtcaaccaatgccgacaacggttgctatagcaccgcatccaccagcaatgcgcccaagggtacgggctagacgaggtcaagccacagatccacacagtattgctgaacggttgcgcagagaaagaatagccgaaagaatcagggcattgcaggagctggttcctagtgtcaacaagacggatcgagccaccatgcttgatgaaattgtggattatgtgaagtttttaaggcttcaagtaaaggtattaagcatgagtagactgggcggagctggtgctgtcgcaccacttgtaacagacatcccactatcatcagttgaggatgaaactggcgaaggaggaagaaaccagccagcttgggagaagtggtcgaatgatggcactgaacggcaggtagctaagctaatggaggaaaatgttggcgctgccatgcaatttcttcaatcgaaggctctttgcatcatgcccatctcactagcgacggccatttaccatacacaaccaccagataccactagtattgtcaagccagaaacaaatccccaatcatagaaccgttgaaaggtgggggagcatcccatggtcctgtctaaaagagtaaagtccaaatgcttagggtcccacgtcttatttgtcacgtttcacccccacaat

SEQ ID NO: 370 - DNA, 1853 bp, Pinus radiata
gttgcaaagcaatacccagaaattattcacaatgtcattgctgcctcccgggataggaggccagggcttgaactctcaggagaacgacccgtatccgtacgacgattcccagttcctagctaacaggctaaggcagcatcaactgagcggtaattcttcgatgaatcagacgccaaaccaggcctcgcaagggattaatgaaaccaatacgtctccgggccgatccatggttttgcagctaagcacaggaagtgcaagcgcttcacagctgctggcctccatgggaaattcgcctcgcggcaccgcggtaatgacgcagtcgcccagtacaggaggcagctgtaatggcagcgacggaggaatgcttcctcttcctctcagtctcggccaggcgggtaaatcaggcgacatcaacgagtcccgctcgcgggatgaaattgaagcttccttcaagtcggcaaatcatgcccgagattcgaacctcggagggctatttccgccgttcgccgcatcaccacggggcgttcgaccgacaggccaaaacttccatacgcagtccggacaagtgccaatgcaagtgtatggtggaatgccccaacctcagcatcagaatccatctccgaccggagttggtgctgcaccacctgttcgacctcgagtaagggcacgccgtggacaggctacagatccccacagtattgcagaaagattgcgtcgggagaggattgcagagagaatgaaggctctgcaagaactggttcctaattccaataagacggataaggcttcgatgctggatgagataattgattacgtcaagtttcttcagctgcaagttaaggttctaagcatgagtcgactgggaggtgcaggagcagttgctccccttgtggctgatatacctgctgagggtgccaacgccccacaaggtacaagaaccaacagtagccagaactcttctccagacggtctagcattaacagaacgccaagtagcaaagctaatggaggaagacatgggatcagccatgcagtatcttcaaggcaaaggtctctgtctgatgcccatatctctggcctcagccattaataactccggtgcgagaccccaggcaccatccaccccttctcttcaagggctattgccacctaatgccaacgacaggcagatactggaaccctcgaactcggcactctctgccctcacgtccacctccatgaccatacagtcttccatcagctcgcctgggagcggaataacggagcaaggtgataatgcacacaaggcagtgaacggaacaaggaatccaaaggattccagagaagccaattccgttacgaagtccaacgggataggaggcccagctctttccaagaacgccgttaaaggagaggacgaacctcaaaggaggacgggccagtaaacagcaccaccttgctaacggaaactgtaccatacttctattaacgccagattgcatgaaattgttcaagcatacgaaatttacttttcacatgcttcaacaatttctaaatagtcgtagtcgcagtcgcagtcgctctatgggagagcattcattcaaaaatcccaaaaacacacttcaaattttcctttctcctgaagtttggtgtttatttttattgaatgggtaaaagaatcgagcaagtctatcaaaataaggcacgcgccccactttgatgatgccttatttaaatagacttgcataaatatgacattatgtatggttgacccaagcgctttgttaatcactacgtaagttatatcttaagttggataataattattgctcatgtcagctacactacgaaattcttgtttatttaaaaaaaaaa

SEQ ID NO: 371 - DNA, 1877 bp, Picea sitchensis
caggtaaaaagaaactttctttttgattcggaataaaattcacacaatgtgtgaaaattccaaaactctcacggtaaacgttttagaatgtaacattgacttgcatgggaaggatgtgaataattaaaaatccttcccacactaaaacccacttgatctttatatgcttaatactaatcccggaagctcttaaaccagaagattgtacaattgaatcttcatactcgaataaaaacaactatttctggttaaacaaaaatcgagaaaagacggacggccatgttacaaccacggcagtttctctcctctggttcttgttagaaagtggtcaattattatgctatttgcagagaactaagattgccaacaaacagctagttcattgtagctgggagatttcagtttaagatgacaggcaaaatcaacattgcaaaaaactccataagagatggctcctaacccacgtcttttcgtatgtgagccaccagtatactttccatatattcgagaatccttgaagttagaagcaaccttttttggcctcggatatcttccctattcctttttcctaagtttcggcaagctagatattatcccaaattctgctccatttgactcagcggtgggaactaattctcttcctctcttttcaactgtgttttcctttaaaaggaaatcactgccaaatccagcagatcccattccaagagcacctgagcaactatcgacagttaatgaagcaggctgattgcctgagctttgcctgtcactagtactgtcaacagaatttgttaccccagaacccaacagtggctttccagttgaactcgatatagcagttgccagtgcaattggcatcaaacaaagccctttattttgcaaatactgcatggctgcagtcatatccttctccatgagcttcacaacattttgctcgaaggctagaccatcctgcgatagtgagccgccagcttgacccagagccgctgatgccaggctgccagatccctcagctggaacatcagcaattagaggcgcaactgcgcctgcaccaccaagcctactcatactcaaaacctttacttgcagttgtagaaatttgacatagtcaatgatttcatccagcatggacgctttgtctgtcttattagcgtttggaacaagctcctgcaaggatttcaaattttttgcaatcctttccctgcgttcccgctcagctatactgtgtggatcagtagcttgactacaaactaatagctccttcaaaagatacggtgtgttttcgccagcaatgacactagaagaactattctgaacatcattattttgagcctggccttctaagttcggactcatatgacttgacggtgttactgacattgttgagactcttgagctcgcttgaagtgttcccatagaatcaccaggcaagcaatttgttggtcctccagcactactatccaaagatgatctgtcggcaccatttatgtcttcccatgaagatgatagtaattgatcaaaaatgtcatccattacagaactcaagagctccactcacttgcaaaacaattgctatgaaattgccctttgtccagcaataaactagctgaaacagccttagctgatagatttcatttcttgttgctctcaaaaatccaaaatcaggctttcccctcagcacctacattaaccgctagcagcagccatgtccgcctataaaatagcagaatttaaccaaagaacgatttctccgtttccaatttagccttctttaatgtcgcggcttggcaaaactgcaaccaacatgtgccggcattgaacgttaacaggagagcagagcagagcagccacattagcataacgttatcagaatttca

SEQ ID NO: 372 - DNA, 1548 bp, Pinus taeda
ttttgggcaaaggtctcactctgaagacaaaatgctagccagagaaaatagatctggagatactgagcatgatgatcttcaagggacccttttgacatcttatacaggaccacaaggaggtcagacagtgctacctagaactccaggggcacaatcccatcaacagaatcttagcacacaaactatacaatcaggtgaaggaacttctctacagcagtatggaaaccattcagctgtttctcagctgcagtctggggctggtggtggcaatgctgcaaatggagctgcaaggccacgtgtcagggcacgtcgaggtcaagctaccgatccacacagtattgctgagcggcttcgcagggagaggattgcagaaaggatgaaatctttacaagaacttgttccaaactctaacaagacagacaaagcatccatgcttgatgagatcatagagtatgtcaagtttttgcagctgcaagtgaaggttttgagcatgagtaggcttgggggtgctggtgcagttgcacctctgattgctgatgttccatctcagggatcaggtggtgtcatgtcaacagccttgggccaagcaagtgggcccttgactctgtcacaggatggtcttgcttttgaacaggaagttgcaagactcatggaatcgaacatgacctcagctatgcaatatttacaaaataaaggactttgtttgatgtccattgcacttgcaacagctatatcaagttcaagtggaaagcctgtactggctactgtgccaggaacaggtgttgatagtagtgagaagcaaaattctgacatgcaatccattgtcttaccttttagtagcagttcaacaaccatgggactcagagctactgcatctggcagtgacgcccctataaatgagaattcaataaataaagctagcatagaaaaagttgtggcagaaaaatcaaatggcatttcacctgggctatcatctgatgtgcccaaggttggatcacagagcagggaagaactcttgaagcgagcacaatgatttctatctgcaagtgtgtctgatttcggtattcaggagtgagcctcaatgctaaggcggttggtgagattttctagtacgcaattttttaacagataggttatataccactgattatggttcacacatctgggatcgtgtgagatttcaataggagcaaaatgtgtaatgtataagtgaacccctgttttaatgagaaatattggtggaactctgttggtgcaaggttgccaacctttttatttccactttccttttaggcaaatttaaggttaccaagtatttattctaacttgaacatgactggtgctgaccatactagggtcctgctactgagataccaagatggctcaggcatccattttcctgtttcccttagttttgatttgtggataagtggatatttatccaaactttaaacaattggatgatcttatttcaatttgcttcaacaaatgttaaatgcaatgttctcaataccaaggtaagtattaccactgggttgttttctgttt

SEQ ID NO: 373 - DNA, 1013 bp, Populus trichocarpa
tcactttgactcctcccagacctactccaaatggccaataacccaaccgaacctccaaccgatgatttcctgcaggaaattcttgggatgcctaattttgcttcagctgaagctggcttggttggagctgacgctggcttggctggcactgcttctgttcaagctcctatgatgcttcagcttagctccggtgatggttccggccacatctccgcactcggcggtgctcctggaggcggaggcgcgggatttcacgggtttccgctggggcttagcttggagcaggggaagggagggtttctgaagcccgaggaggcgtccgggagtgggaatcggttccgtgatgatattgttgatggtagagttagaaatgtttttcatggtcaaccaatgcccacaacagtcactgcagctacacatccaccagcaatgcgcccaagggtacgggctaggcgaggccaggccacagatcctcacagtattgctgaacggttgcgcagagaaagaatagccgaaagaatcagggcattgcaggagctggttcctagcgtgaacaagacggatcgagccgccatgcttgatgaaattgtggattatgtgaagtttttaaggcttcaagtaaagatattaagcatgagtagactgggcggagctggtgctgttgcgccacttgtaacggacatcccactatcaccagttgaggatgaaactggcgaaggcggaagaaaccaactggcgtgggagaagtggtcaaatgatggcactgaaagacaggtagctaagctaatggaggaaaatgttggtgctgccatgcagtttctccaatcaaaggctctttgcatcatgcccatcacactagccactgcaatttaccacacacaaccaccagataccactactattgtgaaaccagaaactaaccccccgtcatagaaccgtggaaaggggggagcatcccgcggtcccgtttaaaagtcaccaaatgcttagggtcccactccttatttgtcccg

SEQ ID NO: 374 - DNA, 1106 bp, Populus trichocarpa
agtagtattttgtgtcatatatttgcatgcatggcaggaaatcccccacctgaagggttaggagatgatttctttgagcagatcttggcagggcagccacctggttatggtggtgaggctgtggggtccaccagcctgcccatgatggggttgcagttagggtctagtgctgctaatgttggattaatgaggagtagtgctaataataatatgggaatgatgcctttagggttaaacttggagcatcatgggtttttaaggcaacaacaagatgatggcagtagttctttagataccaacaacagcaataatatcaataatgcttctcctttttctatcacttctgctggattcttggggagagattctgtacacatgactagcttgttcccaacgtttggacaattgcagattcattcatcaatccggtctgcaccaccaccacttggaccacctcagattcaccagtttaatagccagccaacatcaggagcagtttcagctgtaccacaaccacctggcattcgaccaagggtgcgagcaagacggggccaagctacagatccgcacagtattgctgagaggttgcgaagagtaagaatcacggagagggtgaaggcgttgcaggaattggttcccacttgcaacaagacagatagggcagccatgctggatgaaattgtggattatgtgaagtttcttagactccaagtcaaggttttgagtatgagcagactcggtgcggcgggcgctgtggctcagcttgtagctgatgtaccactgtcatcagttcagggagaaggcattgaaggaggggccaatcagcaagcttgggagaattggtcaaacgatggcactgaacaggaagtagctaagttgatggaagaagatgttggagctgccatgcagctccttcagtccaaggcactctgcatcatgcctgtatcacttgcttcagcaatcttccgagcacgcccaccgaatgctccaacactggtcaagcccgaatcgaaccccccctcataaacctaagcaagaacgtgcaagctttgcatacacatcgatcattccagggggcatctgtttcccaaattaaaaactgctct

SEQ ID NO: 375 - DNA, 1115 bp, Populus trichocarpa
gtagtattttggtgtcatatatttgcatgcatggcaggaaatcctccacctgaagggttgggagatgatttcctcgagcagatcttggcagcgcagccacctggttacggtggtggtggggaggttatggggtccactagcctgcccatgatggggctgcagttagggtcttgtgctggtaatgttggattactgaggagtaatgctaataataacatgggaatgatgcctttagggctgaacttggagcatcatgggtttttaaggcaacagcaagatgatagtggtagttccttagataccaacaacagcaataatatcaataacactcctccttctataaaatctgctcgaatcttggggagagattcggtgcacatgacaagcttgtttccaacatttggacatctgcagattcattcatcaatccggcctacaccacctcctcctggaccacctcaaattcaccagattaatagccatccaaacccaggagcagtttcagctgtaccacaaccgcctggcatacggccaagggtgcgagcaagacggggccaagccacggatccacacagtattgctgagaggctgcgaagagtaagaatcacggagagggtgaaggcgttgcaagaattggttcccacttgcaacaagacagatagggcagccatgcttgatgaaattgtggactatgtgaagtttctaagactccaaatcaaggttctgagcatgagcagactaggtgcagcaggcgctgtggctcagcttgtagccgatgtaccattgtcatcagttcagattaagggagagggcaatgaaggaggagccaatcagcaatcttgggaaaattggtcaaatgatgacactgaacaagaagtagctaagttaatggaagaagacgttggagctgccatgcaattccttcagtcgaaggcactctgcatcatgcccatatcacttgcttcagcaatcttccgagcacgcccacctaacgcatcaacactcatcaacaccgaatcgaacaccccttcataaacctaagcaagaaagtgcatacttcgtgtgctcgtcgatcattccagcaggcatctgggtcccaaatcttgttcttgtcc

SEQ ID NO: 376 - DNA, 1481 bp, Populus trichocarpa
caagacgacaaaaaaaattcacctgtaagcatgataagttcaaatcaaagtgtggagtccttggccactcaagacacttcatctgtagttcttggcagtgagtcagattatgctgttgataaagtcttaatttctgaacaagctcgattgcaaaatgattgccagaattgcaatggaaacccctcccctgatggaatggcacgtggaaacttaaaatttggaaacacaggcctgcaatgcaatggaattcttcctaccctgagttctctgaactatccaaatcagcttccaatagttggtgatttgacatcgtatctctctttttctgaggcaagcaatgctggatgcaatggaagggaacaatctgagtacctgagatccttaaaaaatctgcaaaacttatcatcaatcccacaattgtggccttcacaatcttatgagggtgtttcttctctccctcctttgatgggacaagacagaatagagggatctggtcttcgaggagggaacttggatgatgatatgcatattatggggaagggatacatgggcatggatgaaattctccgacttgataagttatctgcatcacctactacagaggggaaagaagatttgcaaagttgtcctttctcatctggcatagctgagcccaatgtaaacatgtcaatgaatcaattatcatctatgcctcagactacatcagctgctccagtagaaggctgcaatggaactggaaaaactcgtgtaagagcacgacgtggccatgccactgacccacatagtatagctgaaaggcttcgaagagagaaaattgctgaaaggatgaagaatctgcaagaacttgtacctaattccaataaggttgacaaggcatctatgcttgatgagatcatagagtatgtcaaatttcttcagctccaagtcaaggtgctaagcatgagcaggttaggggcagccggagcagtcattcctctcctcacagatggtcaacctgagggtcataatagtttgtcgctctctccatcagctggtctaggaattgatatttctccatctgctgatcagattgcctttgagcaagaagtacttaagctactggaatccgatgtgaccatggccatgcaatatcttcaaagcaaaggtctctgcctcatgcccattgctcttgctgctgccatatccagtgttaaggcatcgttatcaggtacaacttctgaggagaggaagaacaatggctacaccagtggtcttgttagcagcagcagcagcataactggcattgacacccatccaatgtccaatgataacaatattgcaaccggtacacttagcagcaaaggcatgattgtcaatggctgcaatgaggttgtcaagcaagaagtgctgaagaacacttgatgcatttctagagcacggaaagtaaagatgtaatttcattattttagatggggtttcatttttcaagctgaggcagataa

SEQ ID NO: 377 - DNA, 1711 bp, Populus trichocarpa
gggtctctccgctctcagtactcctcactagtcactggctacctgtgctagtattagaaagcaaaccaaagcaaagcgaaaagctgaaaccttgaaagccgaagtacttagctataaagaaaaagaggaaaaagaaagaaagaagaaggtaaccaaacagtccttaactccctcaattaaaacgattttgcatgtaaattgatgctattttgtatccccaactcgctatctcaactcacttcgactcctccgagtccaactccaaatggccaataatccaaccgaacctccaaccgacgatttcctccaggaaatcctcgggatgcctaactttgcttcggctgaagccggtttggttggagccgatgctggcctggctggcgccgctgctgctcaagcttctatgatgctgcagcttagctccggtgatggttccggccacatctccgaccttggcggtgctcctggaggaggaagcgccgggtttcacggctttcccttggggcttagcttggagcaagggaagggagggtttctgaagcccgaggaggcgtctgggagtggaaaaaggttccgtgatgagattgttgatggcagagcgaaaaatgtttttcatggtcaaccaatgcccacaaccgttgctatagcaccgcatccaccagcaatgcgcccaagggtacgggctagacgaggtcaagccacagatccacacagtattgctgaacggttgcgcagagaaagaatagccgaaagaatcagggcattgcaggagctggttcctagtgtcaccaagacggatcgagccaccatgcttgatgaaatcgtggattatgtgaagtttttaaggcttcaagtaaaggtattaagcatgagtagactgggcggagctggtgctgtcgcaccacttgtaacagacatcccactatcatcagttgaggatgaaactggcgaaggaggaagaaaccaaccagcttgggagaagtggtcgaatgatggcactgaacggcaggtagctaagctaatggaggaaaatgttggcgctgccatgcaatttcttcaatcgaaggctctttgcatcatgcccatctcactagccacggccatttaccatacacaaccaccagataccactactattgtcaagccagaaacaaatcccccatcatagaaccgttgaaaggggggggagcatcccatggtcctgtctaaaagagtaaagtcaccaaatgcttagggtcccacgtcttatttgtcacgtttcaacccccacaatcaaatgttcccctagtttcaaattgcaatcaaagtcagatgccatagttcttgcttttgccttttctttccagccttttttttttcaaacggggttcgatgtcaatgcctaaaaaaatgcaggcaggcccttggtgtcctgccaagtccaagtgagaggagaattttcaaagcttactcgatatgctcttcttttggaatcagtggtggggaagtggaaaatgatggaagcgcttttgtaatggggctctaatttttcgtagtgggttgtgggaccttgtaaaagaggcaagactgacgggttatataaatatatcattattgtaatagtgtattcagcgtaaatggaatgcaaaggtagaattgaataatggctggttgtttcaatatgctgggtgtttcaagtccaacagaaaatgatagcagtgctactttgttc

SEQ ID NO: 378 - DNA, 1890 bp, Poncirus trifoliata
ctctctctcttcttcctgttctcacctatttagtatttaacatccatcagaagaatggtttccattctcttgaagaaattcttgactcttcaaatttaaatttccatatatcataaagacttgttctcaagaaattaagatgcagccttgcagcagcggcggtgaaatgcaaggaatcagctcgctcttgagcaacggaagccacgagcagcagtcgcagatccatcaaagcgcgacgtttgatccaacttcgcaagacgacttcttagagcaaatgctatcctctctcccatcgtgttcttggactgacttgaagtctccctggggggttgttgaccttaaccctaataacaataataataatattaacaacaagcagcccagagacttatctgacgaaacggcgccgtccactactcaagagaataatgtccctgcagggtttcagttcgatgagtccatgatcttagcttccaagatgagacagcatcagatcagcgggaatactgggagtgggaataataattctgctgcagcaaagtttatgatgcagcagcagcagcaacaacaaatcatgatggctgctgctagaggtggcatcgggttgcctttatcacttggaaatggtggcgataacgacatcgttgatgcctcatcattcaagtcccaacagggaggagatggctcagtgcaagcactctacaatggcttcactggatctttgcatggctcaacccagcctcaacattttcatcatcttcagggaggatcgatgcccgggcagacctttggggcaccagggccggtgatgaaccagacgcaggctcaggcaagtgggtcaaccggtggtggtggaaacacacccgctcagcagcctaaacaaagggttagggctaggagaggtcaagctactgaccctcacagcatagctgaaagattgcgcagagagagaattgcagagagaatgaaagctcttcaagaacttgttcccaatgccaacaagacagataaggcttcgatgctggatgagatcattgactatgtcaaattcctccagctgcaagtgaaggtcctgagcatgagtagattgggcggtgctgctgctgtcgcaccccttgttgctgatatgtcctcagagggggcaggaggaggtgattgtatccaagcaaacgggcggaaccctaacggagctcagacgacgtcagctaacgacagcttaactgtgacggaacaccaagtggctaagctgatggaagaagatatggggtcagccatgcagtacttacaaggcaaagggctttgtctaatgcccatctcacttgcaactgctatatcgtctgccacgtgtcactctaggaaccccatcatcagcaccagcaacaacaacaataacaacggcaatccccaccacaatcctttgtttcagtccaatggggaaggcccgacctcacctagcatgtcagtgctgactgtccagtcagcaactatgggtaacggtggggctgacggctccgtcaaagatgctgcttccgtttccaagccctgatcaacggacgtcgactgactttatgatgaggctcgtccaaagtctacgaaaataaggcgtcactagatgttggaccttcacgacgtcgtatttgtgtagactttgtgactgaatctaacaaacaacaagaaagcaagaaagaagccaatcccaagaacaaaaaccttattttatgttgttattattattttaatttgcgggttaggttttgttaattttactattattaaaattttaatttctctgatgggatatctccctctttttcttttatttaatattctctgtcatgattctctattaaataattatttataaaagcctttaataattagattataatt

SEQ ID NO: 379 - DNA, 1870 bp, Ricinus communis
cccaacgctgcattttcaggatttctctctctacactacaagaacttgaagccagtacccataaaaccatataccatcttggattccacaacccctttcctggttattgggctgtggatctgccacccaattcaccaacactttctttttctcgggtttcgcatacttcaattcccctcttctctcgtctcttctatttgtctctctaaaaacatactctctccctctctctctctctctctctctctcctcagctaattgaaacatcaaaaaggaaaaagcattaccatattttttacactctaaaacatcaaactttatcactaatactacgactgctactgctactctaaaactacttttgcaatattattgcatggcgggaaatcccccacctgagggattaggagatgatttctttgagcagatcttggcagtgcagccagggtatggaggcggtgatggtggtggcggtggagacgtggtggggtccaccatgcctatgatgggtctacagttggggtctgccagtagtggtggtggtggattgagaactaataatatgggcatgatgcctttagggttaaacttagagttcttgaggcaacaagaagatggtagtggtgctttagataacaacaaccataccaataacaacaataataatgtttcatcttctacaacttctgttatcaatgatagagattctgttcacatggcgagtttgttcccaacgtttggacagttgcaaacccagacgctccggcctccaccaccacctcacctccaccagccatttcatggtcagccaacaccaggagtggtttctgctgcatcacagccacctgccattcgcccaagggtgcgagcaagacgaggacaagccactgatcctcacagcattgctgaacggctgcgtagagagaggattgcagagagaatgaaggctttgcaggagttggttcctacagccaacaagacggacagggcagccatgattgatgagattgtggactatgttaagtttctaaggcttcaagtgaaggtattgagcatgagtagactgggagcagcaggtgcagtggctcagcttgtagctgatgtaccgctagcatcagttgagggagagagcattgacggagcagcagcaaatcagcagacttgggagaagtggtcaaatgatggtactgagcaacaagtagctaagttgatggaagaagacataggagctgctatgcaattcctccagtccaaggcactttgcatcatgcctatatcacttgcttcagcaatccttcgaacacacccccctgatgcaccatcaattatcaagcctgaatcaaacaccccatcataaacctaaccaagaaattaatctcctttcacgtgcagatgaattgctaccagcagacatctgggccccaagtgctggtatagtcccatataactcattctaactcctcattataaatatatatatatatataataaagaaacaatatccagttggtgcagctgttcattttctttaggaggagtcattttcatgtcaagtaagaagaatcacggggcacttgatgtttataatgctatggtcaaggcaaatccaaaatattcaaaaagctccattgatgtgcttctatttcttgtatctgtggtggggttagtggagaatgaccaaaaaattaatagatagtgctaagaaactcttctgtttcatttctcttttggatagtggaagtgtagggccatcaaaaagggggttgataggcagtgtgcatgatgtatttgaaaaatttgtgtggaagttgaatcggataaatgtaggtttgtcgtgtaaatccatgttggaaacttcatgcttgacaat

SEQ ID NO: 380 - DNA, 1008 bp, Ricinus communis
ctcctctcaggccgactcctgcaaatggcaaacaatcccacagaacctccagccgacgatttcctccaagaaatactcggcctacctaacttcgcttcggctgacgcagccggcttggtcggagccgacggtgccttggctactccgatgatgctgcagcttagctctggagacggctccaaccacatcactgccctaggtggagggggaggaggaggaggaggcgctggatttcacgggtttccgttggggctaagcttggagcaaggaaaaggagggtttttaaagcctgaggaagcttcgggaagtggaaagaggtttcgtgatgacgttgtcgatggcagagctaatactgttaagaacgtttttcatggtcaaccaatgcccacaactatggctgcagccccacatcctcccacaatgcgccccagggtgcgggctagacgaggacaagccacagatccacacagcattgctgagcggttgcgcagagaaagaatagctgaaagaattagggcattgcaggagctggttcctagtgtcaacaagacagatagagctgccatgcttgatgaaattgtggattatgtgaagtttctaaggctccaagtgaaggtattaagcatgagtagattgggcggagctggtgcagtcgcaccacttgtaacggacatcccactatcatcagttgaggatgaaactggggaaggtgggagaaaccaaccagcatgggagaagtggtcgaacgatggcacagaacgacaagtggctaaactgatggaagaaaatgtgggtgctgccatgcagtttctgcaatcaaaggctctttgcatcatgcccatctcactggccacagcaatttaccatacacaagcaccggatacctcaactattgtaaaaccagaaacaaatcccccatcatagaccgtacaaacgggtaagcatcccatggtcccatctaaaaaggtcgcctaagtgcttggggtcccacattttgtttgtcccgtt

SEQ ID NO: 381 - DNA, 1141 bp, Sorghum bicolor
tactggacttccccttccccagcagagcagagcagaccaaccgcttgtcgcgagccgcccgaagcttcgggccctgacgcgtgggccccgaccgcgcccgcccccgcccccgcgtcgccgggcatggcggggcagccgccgccgcccgggggctccgaggacgacttcctcgagcacttcttcgccttcccctccgcggcctccgccgccgccgggggacacgcgggcgccggtgccggcggggaccaccccttccccctcgccctcagcctcgacgccgccgccgagcccaagccggaccgtgaccccgtgcagctcgccggcctcttcccgccggtgttcgctggcgccggcggcgtgcagcaaccgcacctccgcggcccaccgcctccgcagatgttccaggcgcagccgaagccgggcgagggaggcatggcgccgcagccgccagccccacggcccaaggtgcgcgcgcggcgggggcaggccaccgatccccacagtatcgcggagaggctaaggagagagagaattgcagaaaggatgagggcattgcaggaattggtccccaacacaaacaagacagatagggcagctatgctagatgagatccttgattacgtgaagtttcttaggcttcaagtaaaggttttgagtatgagcagacttggtggtgctggtgcagttgcacagctggttgctgatattccactctcagttaagggtgaggcaagcgacagtgggagcacacagcacatatgggaaaagtggtcaactgatggcacagaaaagcaggtagcgaagctgatggaagaagacatcggggcagcgatgcagttccttcaatccaaagcgctatgcatgatgccgatctcgcttgcaatggcaatctacgacacccaacattcccaggatggccactcactgatgaagcctgagcccaacacatcctcgtagtatagtaacatcaaccctagcgtgcatttcaaccccctaatactattaggcaccgatatatccaaaaaaaaaaagtgtatgatatacggagcgttccaatgtgctaaccgtgagataggaaaggaccttaaattggtatatgatgtagcctcccctttccctattttatttcaaatcagagcag

SEQ ID NO: 382 - DNA, 1409 bp, Solanum lycopersicum
agcaaagctttaggtgactccctttcctttattttcttcatggctctcactgctctttagaaagtagcaaaacacacacacaaacaacccaaaacacacacttccatttccattttttgcctatatatatatatatatatgtaacaagtacttgttagagtactaatttgtacaccctcttatcaattccgttgtaaagaacacttttttaactagtatttgttcaattgaatgcttttctgaggaattaaggtggtcgaaaacagctccgatccaagaaagattgaatctttatagtttctgctatggctaacaacccttctgagggaccttctgatgatttctttgaccaaatcttgggatttcctgcttacaatggagcagaacctaatttggcgggaaatgatgccggagctataccgccggcgatgatgctccagcttaactctggtgatgggtcaagtcagtttactggagtgggtcttggggttggtttaggtggtggggggttccatggtcatggtgggggtggttcttttcctttagggttgagtttagaacaagggaaaggtgggttcttgaagatggatgatgtttcagcacctggaaggaggtttagagatgatgttgttgatagcagagcttcttcttctgtcaaacctggttttcatggacaaccgatgccttcaatgccgcatccccctgcaatacgtccaagggtgagagctaggcgaggacaagctactgatccacatagcatagcggagaggttacgtagagagaggatagcagaaagaattagagcattgcaagagttggttcccagtgtcaataagactgatagagctgtaatgcttgatgaaattgtagattatatcaaattcctacggctgcaagtgaaggtgttgagcatgagtaggttaggaggagctggtgcagtagcaccacttgttacagacattccaatatcatcagtagaggaagagagcagtgaaggtggaaataataaccaaccagcttgggaaaagtggtcaagtgatggcacagaaaggcaagtggctaaactcatggaagaaaatgttggtgctgcaatgcaatttcttcagtctaaagcactatgtataatgcctatttctcttgcatcagcaatttatcactctcagccaccagatacatcaagtcttgttaagccagaaacaaatcctccttcatagatgaacacccttatagaaaaaggtgacataacatgctaatgaccttaaagaattttcttgcagtggatggttcctacttttatctattcaagtaatatttagctttttgttgaaaaaacagggttcttttttaaaaatatttatgtataaagtaaaccattttctatcatttatatatttgagtagttttgttct

SEQ ID NO: 383 - DNA, 1632 bp, Solanum lycopersicum
gctcattttccgttcctcttaaagctcaataaacctatacgccggcaaactccggcatggcggacaacccaccggaggtatatgctgccgatgattttctcgagcaaattctggcgattccctcttatgctagcctgccggtaactgatttaaccgccggtgcctcatcggagaattcaacatctggtgtctctcagctccagcagcagccgttgttcccattggggttaagtttggataatggctttgctgacgccaacaacactggaggttttcaagtgaagactgaaagagaagcaatgaacatggggaatttgtatccaggtctagaacatttgcaatctcatgctgtttgcctaagtgttcctcaagttcaccaagtccagccttttcaaggccaccctacatcaagcgcaatagtaacaataccacaccaacctgcaattcgtcctagggttcgggcacaaagaggacaggccactgatccacatagtattgctgagcggttaaggagagaaaggatatcagaacgaataaaggctttacaggaacttgtccccagctgcaataagaccgacagggcagcaatgcttgatgagattctggactatgtgaagttcttaaggcttcaagttaaggtactgagcatgagtaggttgggaggaactagcgcggcggcacaagttgttgctgatattccattgcagtctgttgagggagacacctgtgaaagtcattccaaccagcacgtctgggagaagtggtctgattctgaaacagagcaagaggtagcaaagctcatggaggaagatgttggaacagccatgcagtaccttcaatccaaatcactctgcatcatgcctatttcacttgctgcacttatctatccgactcagcaaagtgacaaccaatcaatggtcaagccagaacaagcggccccattgtagacttctaaattactgcaggtgcaatcaagaactcctaatttcttttaggcccatccgtctatatatccttacctattttctcttgaatcaccctctgaaatccttggtaatgcaatcaaactcagatgacacaatttttgcttttagctcaatcattggcccctttatcaactttcttgagttcagtcacaccttgaacaatggcaacacttaagaaagcaaccaatccatctatctatatcattgtagggaggagtgtatatttttttttccaaactctctgttattagctgcttgtttccccctcactcttgtgggttggttgtgactccttgtatcttttttatagtggatagctagcgatgtattataaaagaaaattgtcccagcttgcatttggtggactgtgcggggagaaagaaaccaagtttgtttgaagacaaagccattagtatacagaaactaaagatggaatgtttagggcttttctttttttggtgtaaccatagcttaatggatgatttagaatcaacttatgatgtactagattccttgtgagaagattaaggattaggagcttcttcatttctttatttctgttcttttgctcatctggatgtatatatgggggattacacaccctttgtgtagtttgttattaatacacaaaaatgttacctgttcc

SEQ ID NO: 384 - DNA, 1135 bp, Solanum lycopersicum
ttccatttcagttcctcaaaacccttaacttcttctcgccgggaaaaaaattaatttcgccggataaatctccggcatggcagcaaaccaaccggaaggctatgccgacgatttcctcgagcaaattctcgctattcctccctactctggcttgccggttgctgatgttggcactccatcagagacgacgtcgtttacctcggcgtctgccgtatctcatcttaactctgccgctgctgctggcctacagcaacctttgtttccgctgggattaagcttggataacggccgtgatgacgtcggcgatgcaggtccttatgcagtgaagcatgaaagagatggaatgaatatcggaaatctatatgcaggtctagaacacttgcaatctcatgcagttcgtcactctgtgccttctgttcaccatgtccagccttttcaaggcccaccaacaacgagcacaacagtaactgtgccacacccaccttcaattcgtcctagggttcgagctcggaggggacaagccacagatccacatagcattgctgagaggctgagaagagagaggatatcagaaagaataaaggctttgcaggaactggtacccagctgcaataagacagatagggccgcaatgcttgatgagattctggactatgtgaagttcttaaggcttcaagttaaggtactgagcatgagtaggctgggaggagccagtgcagtggcacaacttgttgctgacattccattacaatctgtgggagggggacagtggtgaaagtagatccaaccagcatatatgggataagtggtccaatgttgacacagaacgagaggttgctaagctcatggaggaagacgtcggtgcagccatgcaataccttcagtctaaatcactctgcatcatgcccatatcacttgctgcactcatctatcctactcaacaaccggatgaccagtccctggtcaagcctgaagcagcagccccatcatagaccttcaattcgttgcacgtgcctctaagaactcccaatagccttgtgtcccccctcctttgtatccttacctaccatccatttgtattttcctgtgtaattggtggcaatgcaatcaatgtcagatgccacaacttttgctt

SEQ ID NO: 385 - DNA, 1348 bp, Solanum tuberosum
ttagaaagtagcaacacacacaaacacccaaaacacacacttccatttccatttttttgcctatatatatatatatatgtaacaagtacttgtgagagtactaatttgtacaccatcttatcattttacttgtaaagaacacttttttaagtagtatttgttcaattgaatgcttttctgagaaattaaggtggtcgaaaacagctccgatccaagaaagattgaatctttatagttctgctatggctaacaacccttctgagggaccttctgatgatttctttgaccaaatcatgggatttcctgcttacaatggagcagaaactaatttggcgggaaatgatgccggagctataccgccggcgatgatgctccagcttaactccggtgatgggtcgggtcaatttactggagtgggtcttggggttgggttaggtggtggggggttccatggtcatggtgggggtgcttcttttcctttagggttgagtttagaacaagggaaaggtgggttcttgaagatggatgatgtttcagcacctggaaggaggtttagagatgatgttgttgatagcagagcttcttcttctgtcaaacctggttttcatggacaacccatgccttcaatgccgcatccccctgcaatacgtccaagggtgagagctaggcgaggacaagctactgatccacacagcattgcggagaggttacgtagagagaggatagcagaaagaattagagcattgcaagagttggttcccagtgtcaataagactgatagagctgtaatgctcgatgaaattgtagattatgtcaaattcctacggctgcaagtgaaggtgttgagcatgagtaggttaggaggagctggtgcagtagcaccacttgttacagacattccaatatcatctgtagaggaagagagcagtgaaggtggaaataataaccaaccagcttgggaaaagtggtcaagtgatggcacagaaaggcaagtggctaaacttatggaagaaaatgttggtgctgcaatgcaatttcttcagtctaaggcactatgtataatgcctatttctcttgcatcagcaatttatcactctcaaccaccagatacatcaagtcttgttaagccagaaacaaatcctccttcatagatgacacccttatagaaaaaggtgacataacatgctaatgaccttaagaattttcttgaagtggatggttcctacttttatctatttaagtaatttttagctttttgttgaaagaaacagggttttttttttttatgtttatgtataaattaaaccattttctatcattgatatattcaagtagttttgttttcagc

SEQ ID NO: 386 - DNA, 1469 bp, Solanum tuberosum
gatttcagttcctcaaaacccttaacttcttctcgccggaaattttttttaatttcgccgggtaaatctccggcatggcagcaaaccaaccggaagcctatgccgatgatttcctcgagcaaattctcgctattccttcctactctggcttgccggtagctgatgttggcactccatcagagacgacgtcgtttacctcggcgtctgccgtatctcatcttaactctgccgctgctgctggcctacagcaacctttgttcccgttgggattgagcttggataacggccgtgatgacgtcagcgaagctggtgcttatgcagtgaagcatgaaagagatggaatgaatatcggaaatttatatgcaggtctagaacacttgcaatctcatgcagttcgtcactctgtgccttctattcaccatgtccagccttttcaaggcccaccaacaacgagcacaacagtaactgtacctcacccaccttcaattcgtcctagggttcgagctcggaggggacaagccacagatccacatagcattgctgagaggctgagaagagagaggatatctgaaagaataaaggctttgcaggaactggtacccagctgcaataagacagatagggcagcaatgcttgatgagattctggactatgtgaagttcttaaggcttcaagttaaggtactgagcatgagtaggctgggaggagccagtgcagtggcacaacttgttgctgacattccattgcaatctgtggagggggacagtggtgaaagtagatccaaccagcatatatgggataaatggtccaatgtagacacagaacaagaggttgctaagctcatggaggaagacgtcggtgcagccatgcaataccttcagtctaaatcactctgcatcatgcccatatcacttgctgcactcatctatcctactcagcaaccggatgaccagtcactggtcaagcctgaagcggcagccccatcatagaccttcaattcgttgcacgtgcctctgagaactcctaatagccttgtgtcccccctcctttgtatccttacctaccatccatttgtattttcctgtgtaattggtggcaatgcaatcaatgtcagatgccacaacttttgcttttatcccaaccattggccctttttttttaattacctttctggagtttcgtcaaacaaggcatgatgtcatcataccttggagaaaggtaaacgtatgaaagcacccaatcaattagcatcattttcggatgaggtgagcttctttttcaaagttatctatgattagctgctcttcttccaccattttgttgtgggattgtggggactccctttatcctttgcatagtggatggtggggctttgtaaaagtaaccaactggttgttggaaagtatattgtaattttagtatattattgtaatgggtagttgaagttgctctccctccaaaaagttttg

SEQ ID NO: 387 - DNA, 772 bp, Solanum tuberosum
cttctatctttctctcttctccttttagaaccaaactttcacacacaaagctactgaagaaaaaatttctctctgcaaaatctcagagaggaaaaaaaaaatgcaagccatgaattcacttctaagtcaacaacagcagtcacagatgtcactgcaagaccttcaaaatggcggaaatggcggttctaccggtggtgttggtggtttaggtcaacacaatatgggtcactttcactttgatccgacgtcgtctcacgacgattttctcgaacagattctctcttctgttccttcttcttctccttggcctgacctttccaaatcctgggacccacatcaccatctctcatcgccgccgcataaccctagctccggcgaagatcaacctccttctaatccacttcactcacagttccattacgacgaccaggcttcttctctactagcctcaaagctccgtcagcatcagatcactggcggcggcgcggctgcagctgctaaagcacttatgctacaacagcagcttttgctttctagaacactcgccggaaacggactcaggtctcctaatggagcttccggcgataacggcctcctttccctacctctaaacctcagtaataatggtgaccaaaacgatggcgtcgctaacccggctaatgacaattccgttcaagctcttttcaatggattcaccggatctcttggtcaaacctccaatcaacctcaacattttcatcatcctcagggaggatcgatgcaatcgcagagt

SEQ ID NO: 388 - DNA, 1290 bp, Solanum tuberosum
gaaagaaaaaaacaatgcaagctatgaactcatttcaaagcaccggcgaaaatggtgcttcgtccggcgaacacatcagtcattcccatttcgatccgtcgtcgtcacacgacgacttcctccaacagattctctcttccgttccttcttcttctccctggcctgaaatctccggcgacggtcacccctacaatttcgacgaccatcagtcaactctcttggcttccaagctccggcagcatcagatcaacggcggcagctctgctgccgcagctgctaaagcgttgatgcttcagcagcagcttctgctttctagaggaatcgccggtaatggcggcgatcaaaacgacgacggtttaaatccggggaatgatatttcagttcaagctctttacaatggattcgctggatctcttggtcaaacctcaaatcaatctcagcattttcaccattctcaggcgcagagtttcggagctccggcggcgtcgttgacgatgaatcaaacgccggcggcgagtggttcagctggtggagcgcagccaaagcaacagaaagttagggctcgaagaggacaagcaactgatcctcacagcattgctgaaagattacggagagagagaattgcagagagaatgaagtctttgcaggagctggtacctaatgccaataagacagacaaggcttcaatgttagatgagatcatcgactatgtcaggttcctccagctccaagtcaaagttctgagtatgagcagattgggtggtgctgcagctgttgctcccctagttgctgatagatcctctgagggaggaggtgattgtgtacaaggaaatggaggtcggggtggcagtaatggaacgacgtcgtctgcaaacaatgacagcagcatgacgatgacggagcaccaggtagctaagctaatggaagaagatatgggatcagcaatgcagtatcttcaaggaaaaggcttatcccttatgccaatttccttagccactgctatttccacctccacgtgtcactccatgaaacccaacaacccactactactcggcggaggctccgctatcaacggcggtggtgagaccggcggtggaccgtcttctcctaccttgtcagcttccactgttcagtcagctacgatgggcaatggcgggacttgagttagtcctcctatcccaatgtgactcactgtttttatttagaatcaatttgattttatatttctcgttttatactattatggaattatttatagtcatattaatattgatgacttgtttttagaaa

SEQ ID NO: 389 - DNA, 2210 bp, Triticum aestivum
cacgagggcaagccaaagcctccgcctctctcctccttttccgcccaaacaaaccgccccctcccctcccgtcgccctcacctccgccctcgccggcagtagtatacgcccgccaccagctccgacgacccgcgccttcccccccgctcgcccgccgtcgtctcccctgcccgctcccccgtccctccgccgcgggtttgttctagagggtgtatctgaagttctctcagcatccgagtgcgcagctttgtacaaaaggaaccattcaggccatctcagattgtcttcatggatgaatgataggatcaccagttgctgtcactttaagtatctacaagtcactcttttcataatatttctgagcagaggttggggagtcaagttgtaagggtgtaaagatggactactctaatggttctttctttccttcatggcctggcaattccgcttccgagaattatagctttgttgatggttcagtggaatcatatgcagaagaaggaagtatgccacctacaggctatttcagagctagatcaaatcagaatttaacatttgatgagcatgaacagaaccctgctatgcttgcaaatgggtgcttgccgtacaacacccagactgatctattatctggtgagattctgtcagaggacaaacattccaacagccttatggagctttccacaacttcagaacaatggcagtctgcaaagtaatttaatcccaccagggactcttcagtgcacttcaacacctggaacatttgacccgcagttggatacccctggccttctagaacttcctcatgccttgtccagttcaattgaaagcaatggtagtgaagtttcagcttttcttgctgatgtacatgctgtttcttcagcctcaactctctgttcgacattccaaaatgttccttcctacatggagccagtaagcctagaagctttcagttttcaagggatacaaaatgctcctatgttcaacaatacaagtcattcaaatgggaaacctgtcagtatttgatgaggcaaccatggcatcactacatgatagcaaagaatttctcagtggtagcatctcatcttttggtacggccgagcagtcacaactagctggtagtggtttgaaggctgaacaacaggaacaaaatgcgatgtgcaatattccactccctttcgcttctggtagtcagatggcagtgagtgaagcacaaggggcaatgattccttcaaagataagctcaacgatccataacaataaaagtgagtaccctgtccctatcagccattctgctgatgcgcagaacaaggcaaattcagctaatggaaacagtgccagtgctaagccacgagcaagggctcgtcgtggacaggcaactgaccctcatagtattgctgaacggcttcgcagagagaagatctcagagaggatgaaaaatctccaagaccttgtaccaaactcaaataaggcagataaatcatcaatgctcgatgaaataattgattatgtgaaatttcttcagcttcaggtgaaggtcttaagcatgagtaggctaggagctcccggggcagttcttcccctccttgcagaatctcaaactgagggccgtagcaattcacctctatcatctccaaccgcttcacaagggcttctggatgcagcaggcccagaagacagcttggtctttgagcaagaagttataaagctgatggaaacaagcatcacaaatgcaatgcagtaccttcagaacaagggcctctgcctgatgcctatcgctcttgcttcagccatatccaaccagaaaggcacttctgcagctgcaatccctcctgaaaggtgaaaacagaaagcacatcatgctcctcccatcggcccgcggaaacaactgtcgaaatgtgctagagttcatagaagttgtgagaaaacaaaaatccgaggctgaaggataggaagttatgcgactaatagtacaagcttatggtataatctagtagcttactccaagaaacctatactttttctcttctctgttgcacatcggttggtgtgtattcttttgttttttggacggcattctaactgggtacaagtgtctggcaccttgggttgtacatggatctatgagggttattaccgactgttcatgatgttatatgatgatcaaagcagacctaggaaaactcggttgctttgggtttcacttggtt

SEQ ID NO: 390 - DNA, 1458 bp, Vitis vinifera
atggatgagtatctggatcacttgttttcatccacatcatggtcagatgtgaatgtgaaggagggatcatcttggatttgtggtgagcctagccaaacaaatgggatgctttcagattcaattggaatatatgaaggtgataaaaaaaactcacctgttggcatgactaattcaaaccttatgatcgagggcttggttactcaagatacttcatctattgttcttggtggagagtctgatcatggtcttggcaagggcttacttttggaagaagctccacggcagcaagaccttcaaaacactgaaggcaattcctccttgaatggagcagtgaatggcagctcagaagttggatacgtgggcctgcaactaaatactcctacttcaaccccatgctcactggatcttggctctcccaagcagctttcgctgattggtggcatgtctaggtcatctcgtcctttcactgagctggatcatgttgggtgcaatggtaatgagccatctgattttcagagatcagttggaaattttcaagcattgcctccaattccacagttgtggtctcaaccatcttacgggggtggttcctccttgtctcctgttatgggagaatacaagatgcagggctttggtctgcaaggagaatatgtggataatgaaatggatatcatgaggaacagatacgttggggatgaaattctgcaacttgataacatttcttcagcaatccccataaaggggaaagaagagcagcacactcatcctttctctccttctgcggttgggccccacatgacaatgacagcatctggattacagtctttgccacagactacggtaggtactgcttctggtggctgtaatggaactggaaagccgcgtgtaagggctcgtcgaggccaggccactgatcctcacagtattgctgaaaggcttcggagagagaaaattgctgaaaggatgaagaacctgcaagaacttgttcccaattccaataagacggacaaagcatctatgctcgacgaaatcattgagtacgtcaaatttcttcagctccaggtcaaggtactaagcatgagtaggctgggggcagcagaggcagttgttcctctcatcacagatggccaagctgagggctctaagggtctgtcactttcaccctcggctggtcaagctgaagatatttgtcaatctcctgatcaaattgcctttgagcaagaagtagtgaagttgatggagtccaacgtgaccatggccatgcaatatcttcaaagcaaaggtctctgccttatgccaattgctcttgctacagccatatccagtggaaaggcagcatcatcaggtactgggtccgatgagggaaagaacgcagcaacaccagtagcagcaacaccagtagcaacagcttacctggcattgggacacatcatacatcttctgatggcaatgttctga

SEQ ID NO: 391 - DNA, 1257 bp, Vitis vinifera
atgctctctactctcccttcttggtctgacctccccgcaaaccctaaatctccctgggaactcaatgcttccaaccctatctccatgccttccaacaagtctagggatttgtccgacgataccacgccgtctaatccggacaacgttcagttcgctttcgacgagtccgccatgttggcctccaagctccgccagcaccagatcagcgggaactcgtcggcggccaagtcggcgttgatgcttcagcagcagttgcttttgtcacgaggcgtcgccatgggtaggtccccgtcgaatgggtccggcgccggtgagtccggccttcttcaactgcctttgtcacttagcaacggggattcttgcctcgttgaccgatcacaaaacgacgtcgttgatgggtcctcctccttcaaatcccccaatcagggaggagacggttcagttcaagctctctacaatggcttcgccggagctcttcacggctccggtcaagcctccaaccaagctcagaatttccaccatcctcagggtggatcaatgcaggcacagaactacggagctccggcgactagggtgagggcaagaaggggtcaggcaactgacccacacagcatcgctgagagattacgtagagagagaattgcagagagaatgaaggcactgcaggaactggttcccaatgccaacaagacggacaaggcttcaatgctggatgagatcattgactatgtcaaattcctgcagctccaagtgaaggtactcagcatgagcaggttgggcggtgccgcagctgttgctcccctcgttgctgatatgtcctctgagggaggtggtgactgtatacaggctagtgggacaagcggccctacaggaggaagggcaacgaacggaacacaaacaaccacatcaaacgacagcctcacagtgacggagcaccaggtggccaaactcatggaggaggacatgggttccgccatgcagtatcttcaaggcaaaggcttatgccttatgcccatctccctcgccactgccatctccaccactacctgccactccaggaaccccatggtggctgctgccgccgtcgccgcctccaacatcaacaacggcagccacactcacccactcctacctaattccaacgccgatggcccctcctcccccagcatgtccgtcctgaccgtgcagtcagccaccatggggaacggcctggccgacgcgcccgtaaaagacgctgcctccgtttccaagccctga

SEQ ID NO: 392 - DNA, 1010 bp, Vitis vinifera
tcttccttctcacggaagctgagaggccgagagctgagacttcactccaatcaaggccatctcttccatctccgaaaccctaacccaccttccgtacggttccgactcgtccgagtttgagtgatggcgagcaatccctcggaagctccagcggacgattttctcgagcaaatcctcggaattcccacctaccccgcagctgaccctaatttggctgctaatgacgtgaatttggccgctcctatggtgcttcagctcggctccggcgaaggctctggccacatcgccggcgggtaccagggaaccatgtttccgttagggttgaggttggagcagggaaagagcagctttctgaagcccgaagacgcgtctggcagtggcaagcgctttcgtgaggaggttattgatggtagagcttctaccgtgaaaaatgctttccatggtcaaccaatgcaggctaccgttgctgcagcaccacatcctcctgcaattcgcccaagggtgcgggcgagacgtggacaggccacagatccacacagcattgctgagcggttacgcagagaaagaatagcagagagaattagagcactgcaggaactagttcctagtgtcaacaagacggatagagctgcaatgcttgatgaaattgtggattatgtgaaattcctaaggctccaagtaaaggtcttgagcatgagtagattgggcggagctggtgcagttgcaccacttgtaacagacattccattagcatcagtcgaggaagaagcaagtgaagggggaagaaatgaaccggcatgggagaaatggtcaaatgacggtacagaacgacaagttgctaagctcatggaagagaatgttggggctgcaatgcagttccttcagtccaaggcactctgcatcatgcccatctctctcgcatcagccatttaccactctcagcagccggacacaactccactgatcaagccccagacaaatcccccatcgtaaaacctctccccactccc

SEQ ID NO: 393 - DNA, 1599 bp, Vitis vinifera
gggagcaaggaaaccgaagcagggcatttcccaaacatctcttaccgatttatcggacgacctctctgtgacctctttctccaacaatttgacctttttgctaaacccgaaaacaatcctcatctcttctttgcttctcgctggaaaatctattttccgttcccgtccattctctagccatggccaccaacccgcccgaaggttacgccgatgatttcctggaacaaatcctcgcaattccctcctatcctggacacgaccctaatatggtgggaacgggttctaccatggtgctgcagctgagttcaggcgacggctcaggccacgtcgccggaggtggcttccaggggccggtctttccgttaggtctgagcttggagagcgggattccggcgacacaggtggcgccaggaagtggcgagcggtttcgagatgacgttgatgccagaggttcttcagggaggagcgagagagagtcggtgcatttggatggtttgtttccggcgtatggacatgtacagtctctctccgtccgacccgccgttcctcaagttcaccaggcttttcatggccagccaacccctgtcccaattactgctgcgccacacccgccagctatccgcccaaaggtgcgtgctcggcgcggacaagccactgatcctcacagcattgctgagcggctacgtagagagaggatagcagaaagaatgaaggctttgcaagaacttgtccctagctccaacaagacggatagggctgcaatgcttgatgaaattgtggactatgtgaagttcctaaggctccaagtcaaggttttgagcatgagtagactgggaggtgctggtgcagtggcacaactcgtggctgacatcccattgccagcagttgagggagaaacgggtgaaggtggaagcaaccagcaagcctgggataaatggtcaaatgatggcacagaacgagaagtagcaaagctcatggaagaagatgttggagctgctatgcagttcctccaatccaaagcactgtgcatcatgcccatatcacttgccgcagcaatataccctgcacaccaaactgatacccccacgctcatcaagcctgagccaaatgctccatcctagacccctcgaaaatgcacgtgcctgttgacaactcccattgacccctagttggctaatcccaaattccttagtatcctgaatccatatcctaaagtgttcctcactatcccttttggcaatgcaatcatagtcagaagccatagtcttgcttttgcctctttttattctgagttttgtcaaagaaagagtgaatcatgctttgggaaaaaagaaaaggcactttcatcacttcttgccatgctcgagtgaagggggaaaattttcaaagctatattgatatgctactccttttcatttgtgctgcttgctggatggccagaacacttgtggtggggactctctttggttgatgctgtggtcttgtaaagcggatgggatgactacgattccatgtaattaaaatgaatttgaagaaagctgaaatggataatggaaagtcaatttcaatgttatattgcattatttccagtcttggagg

SEQ ID NO: 394 - DNA, 1604 bp, Zea mays
gtcggcggcagctggagagcgaggccgagcgaccagttacagttgccggcgggcaaagtgggccacttggtgccaggacatggccgggcaaccgccaccgcagggccccgaagacgatttcttcgaccagttcttctccatgacggccggcggctcctaccccggcgcaaccgcgggcggcggccgcgcaccgggtgaccagccgttttcccttgcgctcagcctcgacgccgcggccgctgaggcttccggaagcgggaagcacgccgacggtggcaaggcggaccgggaggctatacagctccctgggctcttcccgccggcgttcggcggcggtgtgcagccaccccacctccgcgccaccccgcctacacaggtgttccacgcgcagcagccgaagcaaggcggtgcggcagtcgggccacaaccgccggcaccgaggccaaaggtgcgggcgcggcgtgggcaggcgaccgacccccacagcatcgcggagaggctaagaagagagagaatagcagaaaggatgagggccctacaggaattggtgcccaatacaaacaagacagatagagcagctatgctagatgagatcctagattatgtgaagtttctgaggcttcaagtcaaggttctaagcatgagcaggctgggtggtgctggtgctgtggcacagctggttgctgatatcccactttcagttaagggggaagcaagtgatagtgggagcaaacagcagatttgggagaagtggtcaacggacggcacagaaagacaggtcgcaaagctgatggaagaagacattggggcagcgatgcaattcctccagtccaaagcactctgcatgatgcccatctcgctcgccatggcaatctatgacacgcaacattcgcaggacggacaaccagtaaaaccagaacccaacactccttcctagtatagtggcagcaagcgtaacttgcatcctttcggggctgttagcaggcgttaacctaccaatcaaagcgtaagatagaaatgccggcttcgattcactaacaaggaggaggcagggaaaaaagacctaaaagatcctctccacttgaagttgtaccaaatggtatatgatatcgcctttccctttccgatcttttgttcaaaggtgctttaattgcaaggatatggtaagcaataacctgctcatgctcctccatctttcaatgccccctatgagtgtgagtgatggagagagggagctgctaaaagagtctggcatgctctcataatgtttctttccgggtctgtagtgcactagctagccatacactttgtggtgggggggctgctgcttttctggtagtgggtgtatatggactaatcaaaagggactgatgtatgagtgtgtctgcggcctgcgcaaatggttgacaaagtttagatacaggatgaaatggaagatgatgttgatagcgatgttcttccttctccatttttccaaagtggaggtccgaggcaggctttggtcaatggaggctgagcgtgcgtttcagcgttgctagtggatctgctatctgcgttgaatactttatttatatatggatccacactcttgataagaacattcg

SEQ ID NO: 395 - DNA, 1260 bp, Zea mays
gcttcacacttccccagcagagcaggcaaaccgctcccagtcccagtctctcacctgaggtgactggcgtctcttgtcgcaagccgccagaagcttcggcccctgacgcgtgggggccccgtccgcccccgcccccgtccccacgttgccggccatggcggggcagccaccgccgtccggggcctccgaggacgacttcctcgagcacttcttcgccttcccctccgcggcctccgccggcgctgccgggggccacgcgggcgccggtgttggcggggaccaccccttccccctcgccctcagcctcgacgccgccgccgaggccaagccggaccgtgatcccgtgcagctcgccggcctcttcccgccggtgttcgctggcgccggcggcgtgcaccagccgcacctccgcggcccaccgcctccgcagatgttccaggcgcagccgaagccgggcgagggaggcatggcgccgcagccgccagccccgcggcccaaggtgcgcgcgcggcgggggcaggccaccgatccccacagtattgcggagaggctaaggagagagagaattgcagaaaggatgagggcattgcaggaattagtccccaacacaaacaagacagatagggcagccatgctagatgagatccttgattatgtgaagtttcttaggcttcaagtaaaggttctgagtatgagcagactgggcggtgctggcgcggttgcgcagctggttgctgatattccactctcagttaagggcgaggcaggcgacggcgggggggcgccgcagcagcagcagcagcagcacgtgtgggagaagtggtcgacggacggcacggagaagcaggtggcgaagctgatggaggaggacatcggggcggcaatgcagttcctccagtccaaggcgctgtgcatgatgccggtctcgctcgcgatggcgatttacgacacccagcaccccctggacggccacggccactcgctgaagcccgagcccaacgcgtcatcctagtacagtaacgtcgtccttagcgtgccttccaattccaacacccaccccccttctccctaaaaagtactgttaggcgccgatattatccggaagaaaaaaagaagtgtatgatataccgagcgtgcgtttccagtgtgctgacccgtgggataggaaaggaccgaaaattgttggtatatgatgattatgtagcctcctgtttgcctgttctgtttcaaatcaaagcaatgctcatgcatccaggtttc

SEQ ID NO: 396 - DNA, 417 bp, Oryza sativa
atggcggaggagaagcaccaccaccacctgttccaccacaagaaggacgacgagccggccaccggagtagactcctacggcgagggcgtctacacgtcggagacggtgaccaccgaggtggtcgccggcggccaggacgagtacgagaggtacaagaaggaggagaagcagcacaagcacaagcagcacctcggcgaggccggcgccctcgccgccggcgccttcgccctgtatgagaagcacgaggcgaagaaggacccggagaacgcgcacaggcacaagatcacggaggagatcgcggccacggcggcggtcggcgccggcggctacgccttccacgagcaccacgagaagaagaaggaccacaagagcgccgaggagtccaccggcgagaagaagcaccacctcttcggctga

SEQ ID NO: 397 - protein, 138 aa, Oryza sativa
MAEEKHHHHLFHHKKDDEPATGVDSYGEGVYTSETVTTEVVAGGQDEYERYKKEEKQHKHKQHLGEAGALAAGAFALYEKHEAKKDPENAHRHKITEEIAATAAVGAGGYAFHEHHEKKKDHKSAEESTGEKKHHLFG

SEQ ID NO: 398 - DNA, 3246 bp, Oryza sativa
aatccgaaaagtttctgcaccgttttcaccccctaactaacaatatagggaacgtgtgctaaatataaaatgagaccttatatatgtagcgctgataactagaactatgcaagaaaaactcatccacctactttagtggcaatcgggctaaataaaaaagagtcgctacactagtttcgttttccttagtaattaagtgggaaaatgaaatcattattgcttagaatatacgttcacatctctgtcatgaagttaaattattcgaggtagccataattgtcatcaaactcttcttgaataaaaaaatctttctagctgaactcaatgggtaaagagagagattttttttaaaaaaatagaatgaagatattctgaacgtattggcaaagatttaaacatataattatataattttatagtttgtgcattcgtcatatcgcacatcattaaggacatgtcttactccatcccaatttttatttagtaattaaagacaattgacttatttttattatttatcttttttcgattagatgcaaggtacttacgcacacactttgtgctcatgtgcatgtgtgagtgcacctcctcaatacacgttcaactagcaacacatctctaatatcactcgcctatttaatacatttaggtagcaatatctgaattcaagcactccaccatcaccagaccacttttaataatatctaaaatacaaaaaataattttacagaatagcatgaaaagtatgaaacgaactatttaggtttttcacatacaaaaaaaaaaagaattttgctcgtgcgcgagcgccaatctcccatattgggcacacaggcaacaacagagtggctgcccacagaacaacccacaaaaaacgatgatctaacggaggacagcaagtccgcaacaaccttttaacagcaggctttgcggccaggagagaggaggagaggcaaagaaaaccaagcatcctccttctcccatctataaattcctccccccttttcccctctctatataggaggcatccaagccaagaagagggagagcaccaaggacacgcgactagcagaagccgagcgaccgccttctcgatccatatcttccggtcgagttcttggtcgatctcttccctcctccacctcctcctcacagggtatgtgcctcccttcggttgttcttggatttattgttctaggttgtgtagtacgggcgttgatgttaggaaaggggatctgtatctgtgatgattcctgttcttggatttgggatagaggggttcttgatgttgcatgttatcggttcggtttgattagtagtatggttttcaatcgtctggagagctctatggaaatgaaatggtttagggatcggaatcttgcgattttgtgagtaccttttgtttgaggtaaaatcagagcaccggtgattttgcttggtgtaataaagtacggttgtttggtcctcgattctggtagtgatgcttctcgatttgacgaagctatcctttgtttattccctattgaacaaaaataatccaactttgaagacggtcccgttgatgagattgaatgattgattcttaagcctgtccaaaatttcgcagctggcttgtttagatacagtagtccccatcacgaaattcatggaaacagttataatcctcaggaacaggggattccctgttcttccgatttgctttagtcccagaattttttttcccaaatatcttaaaaagtcactttctggttcagttcaatgaattgattgctacaaataatggtgcaaatcaggtctatatgattgattttgggctggccaagaagtatagagactcatcaactcatcagcatattccgtatagagaaaacaaaaatttgacaggaactgctagatacgcaagcatgaatactcatcttggcattgaacaaagtcgaagggatgatttggaatcgctgggttatgttttaatgtacttcttaagaggaagtctcccttggcaggggctgaaagcaggcactaagaaacagaagtatgagaagatcagtgagaagaaagtatcaacatcaatagagaccttgtgtaggggatatcctgcagagtttgcatcatattttcattactgtcgatcactaagatttgatgataaaccagattatgcttatctgaagagaattttccgtgatcttttcattcgtgaagggtttcaatttgattatatatttgactggaccattttgaaatatcagcaatcacagcttgccaatcctccatctcgtgctcttggtggtactgctgggccaagctcagggatgcctcatgctcttgttaatgttgagaggcaatcaggtggagatgaaggtcgaccaactggttggtcttcatcaaatcttacacgtaataagagcacggggctgcatttcaattctggaagcttattgaagcaaaaaggcacagttgctaatgatttatccatgggtaaagagttatccagttctaattttttccggtcaagtggaccattgaggcgtccagttgtctctagcatccgagacccagtgattgcagggggtgaacctgacccctccggcactctgacaaaagatgcaagcccgggaccattgcgtaaagtatccagtgctgcacggaggagttcaccagttgtgtcctcagatcacaagcgcagctcctctatcaaaaatgccaacataaagaatttagagtccaccgtcaagggaatagagggtttaagttttcgatgatgagggactgcattagtagctgtgctttgtctcagttctccgttcactgtaaattttggcacaccaacttggggagtaagagttctgatattagttgctgtcaggaagtaccataaagctgaattatacaattaaaatttgggatccaatcgcaaaagcacattaaggatatgatggggttgcagatccaaactcacagattccagtttatgctcgtccatacagttataggcactttccatattcttttctttaatctctgtctcttgcttgttattgttatgtcgtggtattcttgttgaggtcatgtttgtgaattgcgaagatggtcatgtataattgccgagaaatcatgtactagtttgttttaaacatgagcaaactgttattttgttcaagctactttaatatcaaaaaaaaaaaaaaaagggcggccgctctagagtatccctcgaggggcccaagcttacgcgtacccagcttt

SEQ ID NO: 399 - DNA, 52 bp, Artificial sequence
  primer: prm06442
ggggacaagtttgtacaaaaaagcaggcttaaacaatggcggaggagaagca

SEQ ID NO: 400 - DNA, 46 bp, Artificial sequence
  primer: prm06443
ggggaccactttgtacaagaaagctgggtcggcgacgttgtgatga

SEQ ID NO: 401 - DNA, 546 bp, Zea mays
atggccgactactaccacggcggcagggccatgtactccaacactgacgagtgctatgacgccggcaggcacggcggcagcgtgagggcgtactcgcgcaccgacgagtactacgacaacgtggacgaccgcatgaggaggcccgcgtacggcgccgacgactgcggctacggcggcaggcagaccgccgtgtacgccgacgagtactcccgcggcggccgctacgaaggctacggcgtcgagcaggagcacttcaagagggaggagaaggagcataagcacaaggagcgcctcggcgaggtgggcgccctcgcgggcggcgcctttgctctgtacgaggggcaccgtgcgaagaaggacccggcgaacgcgcagaggcacaagatcgaggccggcgtggcaacggcggcggcgctgggcgccggcggctacgcgtaccacgagcaccgcgagcagaaggaggcccactacgagagcaggcagcaggagcacagggtgccgcacgggcacgggcacgggcacggctactcctactactgcgactga

SEQ ID NO: 402 - protein, 181 aa, Zea mays
MADYYHGGRAMYSNTDECYDAGRHGGSVRAYSRTDEYYDNVDDRMRRPAYGADDCGYGGRQTAVYADEYSRGGRYEGYGVEQEHFKREEKEHKHKERLGEVGALAGGAFALYEGHRAKKDPANAQRHKIEAGVATAAALGAGGYAYHEHREQKEAHYESRQQEHRVPHGHGHGHGYSYYCD

SEQ ID NO: 403 - DNA, 468 bp, Zea mays
tagataaatcgacggtcggtgcatatatatgagcaagactgccaggcgcgcccggtaacaaatgagaatggaagccgtcagtaactagtggtgatggtgtccacggtggcggtgcttcttggcgtctttcttctggtgatgctcgtggaaggcaaagccggcgctgcccacggcggcggcggcggcgaccccttccttgatcttgtgcgagtgcgcgtgctccgggtccttcttcgccttctgcttctcgtgcatagcgtaggctcctgcagcgacggcgccgagctggccgagctgctccatgtgcttgtggtgcttctcctccttgcgccagtcggtcaccttggccgcctctcctccatggtgcttgttgcccaggaagtggtgcgccattgtttcagtcgttggagatgcgctagtcgacggccggttgtgtcttggggttcgttcgatctgcttgatgatgat

SEQ ID NO: 404 - protein, 102 aa, Zea mays
MAHHFLGNKHHGGEAAKVTDWRKEEKHHKHMEQLGQLGAVAAGAYAMHEKQKAKKDPEHAHSHKIKEGVAAAAAVGSAGFAFHEHHQKKDAKKHRHRGHHHH

SEQ ID NO: 405 - DNA, 434 bp, Zea mays
atggagcagctcggccagctcggcgccatcgccgccggcgcgtacgctctggtgagaccaaaaaaacccaacctccatccctttggtcgcctgatcgatgcatgccatggtccagctcttgatctgtgtgtgtctgtgcgtgtgcatcgacgtgtggctgcagcacgagaagcacaaggccaagaaggacccggagaacgagcacggccaccgggtcaaggaggaggtggccgccgtcgccgccgtgggctccgccgggttcgccttccacgagcatcacgagaagaaggacgccaagaagcacgcccacaactgatccgtcgcaggctgcctcagccgaagcagcagcacatcgtcgcggttgctgtttcatctgttctcccagcctcgtcttcgtctactgtgtgccgggcaggccttgatttgaggctttg

SEQ ID NO: 406 - protein, 144 aa, Zea mays
MEQLGQLGAIAAGAYALVRPKKPNLHPFGRLIDACHGPALDLCVSVRVHRRVAAAREAQGQEGPGERARPPGQGGGGRRRRRGLRRVRLPRASREEGRQEARPQLIRRRLPQPKQQHIVAVAVSSVLPASSSSTVCRAGLDLRL

SEQ ID NO: 407 - DNA, 417 bp, Zea mays
atggcggaggagaagcaccaccaccaccacctgttccaccacaagaaggacgaggagcagctcgccgccggcgggtacggcgagtccgccgagtacacggaggccacggtgacggaggtggtgtccacgggcgagaacgagtacgacgagtacaagaaggaggagaaggagcacaagcacaagcagcacctcggcgaggccggcgccatcgccgccggcgccttcgcactctacgagaagcacgaggcgaagaaggacccggagcacgcgcaccgccacaagatcgaggaggaggtcgcggcggcggcggccgtcggctccggcggcttcgccttccacgagcaccacgagaagaagaaggaccacaaggaggccgaggaggccggcggcgagaagaagcaccacttcttcggctga

SEQ ID NO: 408 - protein, 138 aa, Zea mays
MAEEKHHHHHLFHHKKDEEQLAAGGYGESAEYTEATVTEVVSTGENEYDEYKKEEKEHKHKQHLGEAGAIAAGAFALYEKHEAKKDPEHAHRHKIEEEVAAAAAVGSGGFAFHEHHEKKKDHKEAEEAGGEKKHHFFG

SEQ ID NO: 409 - DNA, 396 bp, Zea mays
atgtcggaggagaagcaccaccacttcttcaaccaccacaagaaggacgaggagcagcccgccggcgagtacgggtactccgagaccgaggtggtcaccgccaccggcgagggcgagtacgagaggtacaagaaggaggagaaggagcacaagcacaagcagcacctcggcgaggccggcgccatcgccgccggcgccttcgcactctacgagaagcacgaggcgaagaaggaccccgagcacgcgcacaggcacaagatcacggaggaggtcgctgccgcggcggccgtcggcgccggcggctacgtattccacgagcaccacgagaagaagaaggaccacaaggacgccgaggaggccagcggcgagaagaagcaccaccacctcttcggctga

SEQ ID NO: 410 - protein, 130 aa, Zea mays
MSEEKHHHFFNHHKKDEEQPAGEYGYSETEVVTATGEGEYERYKKEEKEHKHKQHLGEAGAIAAGAFALYEKHEAKKDPEHAHRHKITEEVAAAAAVGAGGYVFHEHHEKKKDHKDAEEASGEKKHHHLF

SEQ ID NO: 411 - DNA, 204 bp, Zea mays
atggagaagctcggcgagctcggcgccatcgccgccggcgcgtacgccctgcacgagaagcacaaggccaagaaggacccagagaacgagcacgggcaccgggtcaaggaggaggtggccgccgtcgccgccgtgggctccgccggcttcgctttccacgagcaccacgagaagaaggacgccaagaagcacgcccacaactga

SEQ ID NO: 412 - protein, 67 aa, Zea mays
MEKLGELGAIAAGAYALHEKHKAKKDPENEHGHRVKEEVAAVAAVGSAGFAFHEHHEKKDAKKHAHN

SEQ ID NO: 413 - DNA, 1008 bp, Zea mays
ttgtcacttgctctccctccaacaagctaattaaggccggtcatccctcttctagctcgtttcattatccatggcggaggagaagcaccaccaccaccacctgttccaccacaagaaggacgaggagcagctcgccgccggcgggtacggcgagtccgccgagtacacggaggccacggtgacggaggtggtgtccacgggcgagaacgagtacgacgagtacaagaaggaggagaaggagcacaagcacaagcagcacctcggcgaggccggcgccatcgccgccggcgccttcgcactcgtacgtagtccgatcgatccgatcctccttgagtagtatatatatatacatacatgaacgagaaagaataatatatatattaatcgaacgaactgaatgacggtcacctcgtgtgacgtggacatgcacagtacgagaagcacgaggcgaagaaggacccggagcacgcgcaccgccacaagatcgaggaggaggtcgcggcggcggcggccgtcggctccggcggcttcgccttccacgagcaccacgagaagaagaaggaccacaaggaggccgaggaggccggcggcgagaagaagcaccacttcttcggctgattgatcctcccgtatcgtcgtccctccccgtgtgctacgcgtgcgtgtgagagtgatatcgagcgcccgccgtgttgtgcgcgcgtacgtatgtatgcgctcgtgtgatgcacgaataagcgtggctacgtaatctatcgtatgtatacgtgtgtgtatgcatgtgcttgtgtatgatcgtggtacgaggaccgaaaaaatgtatgcaactctgatttacttacatgtttagttgtttacgtttctccaaaagtattagtacccattatgttatattttactatattatattttattgattattaaactatgtatggatgaaattactatttcaagctggtagctagaccgagataaaactcgtccgtgttttttaacgggtgtattatt

SEQ ID NO: 414 - protein, 88 aa, Zea mays
MAEEKHHHHHLFHHKKDEEQLAAGGYGESAEYTEATVTEVVSTGENEYDEYKKEEKEHKHKQHLGEAGAIAAGAFALVRSPIDPILLE

SEQ ID NO: 415 - DNA, 588 bp, Zea mays
agaaggagcataagcacaaggagcgcctcggcgaggtgggcgccctcgcgggcggcgcctttgctctggtaatatatataatacagttaccatatatatatgtgcatgcacgatctatatatgtggtgatgtgttgttgatggaatataatatgtggaaattagtacgaggggcaccgtgcgaagaaggacccggcgaacgcgcagaggcacaagatcgaggccggcgtggcaacggcggcggcgctgggcgccggcggctacgcgtaccacgagcaccgcgagcagaaggaggcccactacgagagcaggcagcaggagcacagggtgccgcacgggcacgggcacgggcacggctactcctactactgcgactgaaacgactgatcatcccatcgatcgagatatgcatgcagaactcgatatatatacggcccctagcgccgtacacgtgcgtgcgtgtaagtaaataagagcaaacgtcgtcacgtgtgtgttgctcgatcactactccatcgatctacttattatcgtctgcaaataacgactaagcgcatgcttctgcagcgtgtaacgatcaaaaaaaaaa

SEQ ID NO: 416 - protein, 110 aa, Zea mays
MEYNMWKLVRGAPCEEGPGERAEAQDRGRRGNGGGAGRRRLRVPRAPRAEGGPLREQAAGAQGAARARARARLLLLLRLKRLIIPSIEICMQNSIYIRPLAPYTCVRVSK

SEQ ID NO: 417 - DNA, 939 bp, Zea mays
  misc_feature (914)..(914): n is a, c, g, or t
ggtcgacgatttcgtcggcccaacactagtagcgtagctgagagcctgagacgatggccgactactaccacggcggcagggccatgtactccaacactgacgagtgctatgacgccggcaggcacggcggcagcgtgagggcgtactcgcgcaccgacgagtactacgacaacgtggacgaccgcatgaggaggcccgcgtacggcgccgacgactgcggctacggcggcaggcagaccgccgtgtacgccgacgagtactcccgcggcggccgctacgaaggctacggcgtcgagcaggagcacttcaagagggaggagaaggagcataagcacaaggagcgcctcggcgaggtgggcgccctcgcgggcggcgcctttgctctgtacgaggggcaccgtgcgaagaaggacccggcgaacgcgcagaggcacaagatcgaggccggcgtggcaacggcggcggcgctgggcgccggcggctacgcgtaccacgagcaccgcgagcagaaggaggcccactacgagagcaggcagcaggagcacagggtgccgcacgggcacgggcacgggcacggctactcctactactgcgactgaaacgactgatcatcccatcgatcgagatatgcatgcagaactcgatatatatacggcccctagcgccgtacacgtgcgtgcgtgtaagtaaataagagcaaacgtcgtcacgtgtgtgttgctcgatcactactccatcgatctacttattatcgtctgcaaataacgactaagcgcatgcttctgcagcgtgtaacgatccatcactgttactatatctaatgatgcatgcatgcaattaagctatatatgtaaaaaactatgcgtgtaaaaaaaaaaaaaaaaaaaaaaaaaaaaaaaaaaaaaaaaaaaaanccaacctaaaaaaaaaaaaaaaaaa

SEQ ID NO: 418 - protein, 181 aa, Zea mays; identical to SEQ ID NO: 402

SEQ ID NO: 419 - DNA, 348 bp, Lycopersicon esculentum
atggaggaggagaaacaccaccaccaccacctgttccaccacaaggacaaggcggaggagggccccgtcgactacgaaaaagaaatcaaacaccataaacatctcgagcaaatcggtaaacttggcactgttgctgccggtgcctacgccttgcatgagaaacatgaggcaaagaaagatccagaacatgcacacaaacacaagatagaggaagagatagcagcagctgctgcagttggggcaggtggatttgcattccatgagcatcatgagaaaaaagatgccaagaaagaagaaaaaaaaaagctgaggggggacaccaccatctcttctaaattgttattttag

SEQ ID NO: 420 - protein, 115 aa, Lycopersicon esculentum
MEEEKHHHHHLFHHKDKAEEGPVDYEKEIKHHKHLEQIGKLGTVAAGAYALHEKHEAKKDPEHAHKHKIEEEIAAAAAVGAGGFAFHEHHEKKDAKKEEKKKLRGDTTISSKLLF

SEQ ID NO: 421 - DNA, 429 bp, Lilium longiflorum
atggccgaggagcaccacaagcaccacctcttccatcacaacaaggagagcaacccggaggtggtcgtctccgagaccaactacatcaccgacggcttaaactccacctacagcacatccagcgatgtatacggtggcaaccagtcacaggccaactacgaggactacgagaaagagaagaagcacatcaagcataaggagcatctcggcgagatggccacggccggcgccggtgcttttgccctttacgagaagcacgaggcaaagaaggaccccgagcacgcccacaggcacaaattggaggaggagattgccgcagctgcagctgcgggggctggagggtacaccttccatgagcaccacgagaagaaaaccttgaagaaggagaatgaggaagtcgaggggaagaagcaccacttcttcggttaa

SEQ ID NO: 422 - protein, 142 aa, Lilium longiflorum
MAEEHHKHHLFHHNKESNPEVVVSETNYITDGLNSTYSTSSDVYGGNQSQANYEDYEKEKKHIKHKEHLGEMATAGAGAFALYEKHEAKKDPEHAHRHKLEEEIAAAAAAGAGGYTFHEHHEKKTLKKENEEVEGKKHHFFG

SEQ ID NO: 423 - DNA, 429 bp, Saccharum officinarum
atggcggaggagaagcaccaccaccacctgttccaccacaagaaggacgaggaggagcaggtggagcagcccgccggcggcggcgggtacggcgaggccgccgagtacacggagaccacggtgacggaggtggtgtccacgggcgaggacgagtacgacaagtacaagaaggaggagaaggagcacaagcacaagcagcacctcggcgaggccggcgccatcgccgccggcgccttcgcactctacgagaagcacgaggcgaagaaggacccggagcacgcgcaccgccacaagatcgaggaggaggtcgcggccgcggcggccgtgggatccggcggcttcgcgttccacgagcaccacgagaagaagaaggaccacaaggaggccgaggaggccggcggcgagaagaagcaccacttcttcggctga

SEQ ID NO: 424 - protein, 142 aa, Saccharum officinarum
MAEEKHHHHLFHHKKDEEEQVEQPAGGGGYGEAAEYTETTVTEVVSTGEDEYDKYKKEEKEHKHKQHLGEAGAIAAGAFALYEKHEAKKDPEHAHRHKIEEEVAAAAAVGSGGFAFHEHHEKKKDHKEAEEAGGEKKHHFFG

SEQ ID NO: 425 - DNA, 777 bp, Zea mays
tgtcgatccaattgtcacttgctctccctccaacaagctaattaaggccggtcgtcatccctcttctagctcgttttattatccatggcggaggagaagcaccaccaccaccacctgttccaccataagaaggacgaggagcaggaggagcagctcgccggcggcgggtacggcgagtccgccgagtacacggaggccacggtgacggaggtggtgtccacgggcgagaacgagtacgacgagtacaaggaggagaagcagcataagcacaagcagcacctcggcgaggccggcgccatcgccgccggcgccttcgcactctacgagaagcacgaggcaaagaaggacccggagcacgcgcaccgccacaagatcgaggaggaggtcgcggcggcggcggccgtcggctccggcggcttcgccttccacgagcaccacgagaagaagaaggaccacaaggacgccgaggaggccggcggcgagaagaagcaccacttcttcggctgattgatccctcccgtatcgtcgtccctccccgtgtgctacgcgtgcgtgtgtgagagtgatatcgagcgcccgccgtgttgtgcgcgcgtacgtatgtatgcgctcgtgtgatgcacgaataagcgtggctacgtaatctatcgtatgtatacgtgtgtgtatgcatgtgcttgtgtatgatcgtggtacgaggaccgaaaaaatgtatgcaactctgatttacttacatgtttagttgtttacgtttctccaaaaaaaaaaaaaaaaaaa

SEQ ID NO: 426 - protein, 140 aa, Zea mays
MAEEKHHHHHLFHHKKDEEQEEQLAGGGYGESAEYTEATVTEVVSTGENEYDEYKEEKQHKHKQHLGEAGAIAAGAFALYEKHEAKKDPEHAHRHKIEEEVAAAAAVGSGGFAFHEHHEKKKDHKDAEEAGGEKKHHFFG

SEQ ID NO: 427 - DNA, 1182 bp, Arabidopsis thaliana
atggactgcaacatggtatcttcgtcccagtgggattgggagcatttgatcatgtccaatccgtcaaggactgaagatgacagcaaacagctacctactgagtgggaaattgaaaaaggtgaaggaattgaatctatagttccacatttctcaggccttgagagagtcagtagtggctctgccaccagcttctggcacactgctgtatcgaaaagctcacagtcgacctctatcaactcatcatctcccgaagccaaacgatgcaagcttgcatcagaaagttcccctggagattcttgcagcaacatagactttgtccaggtgaaggctcccacagctctcgaggtatccgttgcctcagctgaatcagatctttgtttaaaactaggaaagcggacatactctgaagaatactggggtagaaacaataatgaaatttcagcggtttctatgaagttgttaactccatctgttgtcgctgggaaatccaaattgtgtggtcagagcatgccagtcccgcgttgccaaattgatggctgtgaactggatctctcatctgctaagggttatcatcgtaagcacaaagtctgcgaaaagcattcaaagtgcccaaaagttagcgtgagtggcctggaacgtcggttctgccaacagtgtagcaggttccatgctgtctctgaatttgatgagaagaaacgaagctgccgaaaacgtctttctcatcataatgcgaggcgtcgtaagccacaaggagtattttcaatgaatcccgagagggtgtatgatcgaagacagcatacaaatatgttgtggaatggggtgtcccttaacgcgagatctgaagaaatgtatgaatggggtaataacacttatgatacaaagcctagacaaacggaaaaaagctttactctgagcttccagagaggtaatggctctgaggaccagctggttgctagtagcagccgtatgttctctacatctcaaacctcaggtgggttcccagcaggaaagtccaagtttcaacttcatggcgaagatgtgggagaatactcaggagtcctccatgaatctcaagatatccaccgtgctctctctcttctgtcaacctcttcggatcccctggcccaaccacatgtgcagccattttctctactctgttcatatgatgttgtaccaaaatag

SEQ ID NO: 428 - protein, 393 aa, Arabidopsis thaliana; identical to SEQ ID NO: 172

SEQ ID NO: 429 - DNA, 1464 bp, Arabidopsis thaliana; identical to SEQ ID NO: 171

SEQ ID NO: 430 - DNA, 1551 bp, Arabidopsis thaliana
ctgggtgaaacatagaaaagtttctcttgctcaagttaatgataaaagggtgagagcaataaacgctgataagccttgtctggtccttggaattttgaattttctttttctatcttacttatagtattggtagttgagggtgtcgtcgataagttgttgtaggatttgttgctctggctctggtggtaggtctatgaaatcaacccatatcgtgaatggactgcaacatggtatcttcgtcccagtgggattgggagcatttgatcatgtccaatccgtcaaggactgaagatgacagcaaacagctacctactgagtgggaaattgaaaaaggtgaaggaattgaatctatagttccacatttctcaggccttgagagagtcagtagtggctctgccaccagcttctggcacactgctgtatcgaaaagctcacagtcgacctctatcaactcatcatctcccgaagccaaacgatgcaagcttgcatcagaaagttcccctggagattcttgcagcaacatagactttgtccaggtgaaggctcccacagctctcgaggtatccgttgcctcagctgaatcagatctttgtttaaaactaggaaagcggacatactctgaagaatactggggtagaaacaataatgaaatttcagcggtttctatgaagttgttaactccatctgttgtcgctgggaaatccaaattgtgtggtcagagcatgccagtcccgcgttgccaaattgatggctgtgaactggatctctcatctgctaagggttatcatcgtaagcacaaagtctgcgaaaagcattcaaagtgcccaaaagttagcgtgagtggcctggaacgtcggttctgccaacagtgtagcaggttccatgctgtctctgaatttgatgagaagaaacgaagctgccgaaaacgtctttctcatcataatgcgaggcgtcgtaagccacaaggagtattttcaatgaatcccgagagggtgtatgatcgaagacagcatacaaatatgttgtggaatggggtgtcccttaacgcgagatctgaagaaatgtatgaatggggtaataacacttatgatacaaagcctagacaaacggaaaaaagctttactctgagcttccagagaggtaatggctctgaggaccagctggttgctagtagcagccgtatgttctctacatctcaaacctcaggtgggttcccagcaggaaagtccaagtttcaacttcatggcgaagatgtgggagaatactcaggagtcctccatgaatctcaagatatccaccgtgctctctctcttctgtcaacctcttcggatcccctggcccaaccacatgtgcagccattttctctactctgttcatatgatgttgtaccaaaatagatgagtaagtaatgtgtaatttgtaaacctgttactcagttggtggatacttttccaaacctatgataaaaacctcgtcctagatcccgttaaatgccaaactttcggctactataactatgttatcgttatcattatcattgtttaacaccct

SEQ ID NO: 431 - DNA, 1182 bp, Arabidopsis thaliana
atggactgcaacatggtatcttcgtcccagtgggattgggagcatttgatcatgtccaatccgtcaaggactgaagatgacagcaaacagctacctactgagtgggaaattgaaaaaggtgaaggaattgaatctatagttccacatttctcaggccttgagagagtcagtagtggctctgccaccagcttctggcacactgctgtatcgaaaagctcacagtcgacctctatcaactcatcatctcccgaagccaaacgatgcaagcttgcatcagaaagttcccctggagattcttgcagcaacatagactttgtccaggtgaaggctcccacagctctcgaggtatccgttgcctcagctgaatcagatctttgtttaaaactaggaaagcggacatactctgaagaatactggggtagaaacaataatgaaatttcagcggtttctatgaagttgttaactccatctgttgtcgctgggaaatccaaattgtgtggtcagagcatgccagtcccgcgttgccaaattgatggctgtgaactggatctctcatctgctaagggttatcatcgtaagcacaaagtctgcgaaaagcattcaaagtgcccaaaagttagcgtgagtggcctggaacgtcggttctgccaacagtgtagcaggttccatgctgtctctgaatttgatgagaagaaacgaagctgccgaaaacgtctttctcatcataatgcgaggcgtcgtaagccacaaggagtattttcaatgaatcccgagagggtgtatgatcgaagacagcatacaaatatgttgtggaatggggtgtcccttaacgcgagatctgaagaaatgtatgaatggggtaataacacttatgatacaaagcctagacaaacggaaaaaagctttactctgagcttccagagaggtaatggctctgaggaccagctggttgctagtagcagccgtatgttctctacatctcaaacctcaggtgggttcccagcaggaaagtccaagtttcaacttcatggcgaagatgtgggagaatactcaggagtcctccatgaatctcaagatatccaccgcgccctatcgctgctatcgacctcttcggatcccctggcccaaccacatgtgcagccattttctctactctgttcatatgatgttgtaccaaaatag

SEQ ID NO: 432 - DNA, 1586 bp, Arabidopsis thaliana
gccctttttgttggtctgggtgaaacatagcaaggtttctcttgctgaggttattgataaacgggtgagttaaataaaaacgttgatcagcagtgtgtggtgcttggaattcataaggtctatgaaatcaacccacatcttgaatggactgcaacatggtatcttcgttcccgtgggactgggagaatttgatcatgtccaatcagtcgaagactgaaaatgaaaaaaaacagcaatctactgagtgggaatttgaaaaaggtgaaggaattgaatctatagttccagatttcttaggctttgagaaagtcagtagtggctctgctactagtttctggcacactgccgtatcaaaaagctcgcagtcgacctctatcaactcatcatctcccgaggacaaacgatgcaatcttgcatcacaaagttcccctggagattcttccagcaacatagattttctccaggtgaaaccatccacagctctcgaggtacctattgcctcagctgaatcagatctttgtttgaaactaggaaagcggacatactctgaagaattttggggtaggaacaataatgacctttcagcggtttctatgaatttgttgactccatctgttgttgctcggaagaaaaccaaatcgtgtggtcagagcatgcaagttccgcgttgccaaattgatggctgtgagctggatctctcatcttctaaggattatcatcgcaagcatagagtctgcgaaacgcattcaaagtgcccaaaagttgttgtgagtggcctggaacgtcgtttctgccaacagtgtagcaggttccatgctgtctcagaatttgatgaaaagaaacgaagctgccgcaaacgtctttctcatcataatgcaaggcgtcgcaagccacaaggagtatttccactgaattcagagagggtgttcgatcgaagacagcatacaagtatgttgtggaatgggttgtcccttaacacgagatctgaagaaaagtatacatggggtaccacttatgagacaaagcctacacagatggaaagcggctttactctgagcttccagagaggtaatggctctgaggaccaactgtttactggtagcaccctctctttctctgcgtttcaaacatctggtgggttctcagcagggaaatccaacattcaacttccagacaaaggtgtgggagaatgctcaggaggcctccatgaatctcatgatttctacagtgctctctctcttctgtcaactacttcggattcacaagggatcaaacacactcccgtggccgaaccaccgccaatatttggcactttccctagtcatttcatctgaaagagttaaaaaatgcgaagtcactccataaaaagtcgggttgcatcatccgatggagtttgacagtttgttttcaaataaaataaaaatgtgcaacatccattgctcaagctaaaccagtcactcggttagctcagcttttcttatacatttccaaacatattgtcaatttccttctggattctgttggtatgacaactttgttactctgtcaaacatgtctacgactattttaaaaccatttcagagatt

SEQ ID NO: 433 - protein, 396 aa, Arabidopsis thaliana
MDCNMVSSFPWDWENLIMSNQSKTENEKKQQSTEWEFEKGEGIESIVPDFLGFEKVSSGSATSFWHTAVSKSSQSTSINSSSPEDKRCNLASQSSPGDSSSNIDFLQVKPSTALEVPIASAESDLCLKLGKRTYSEEFWGRNNNDLSAVSMNLLTPSVVARKKTKSCGQSMQVPRCQIDGCELDLSSSKDYHRKHRVCETHSKCPKVVVSGLERRFCQQCSRFHAVSEFDEKKRSCRKRLSHHNARRRKPQGVFPLNSERVFDRRQHTSMLWNGLSLNTRSEEKYTWGTTYETKPTQMESGFTLSFQRGNGSEDQLFTGSTLSFSAFQTSGGFSAGKSNIQLPDKGVGECSGGLHESHDFYSALSLLSTTSDSQGIKHTPVAEPPPIFGTFPSHFI

SEQ ID NO: 434 - DNA, 1260 bp, Arabidopsis thaliana
atggagtgtaatgcaaagccaccgtttcaatgggaattggaaaacttgatatcttttggcacttctacagctgaagttcctagaaagctaaaaccaatggagtgggaaattgatggatttgattgcacctctctgtattcttcaagctttgcctatgctggtagttcaggttctgatatagctcatgctttctctaaaagctcaaagtcaacttccattagctcttcatcagctgaagtaagaacacacaattttacatccgaaactggtgaaagtcttcctggagaatttgcaaaggggattgatacttctccaagtcttgaactttcttttggctctggtgatccggttctcggtttaaagcttggtaaacgaacgtactttgaagacttttgggaagtggagaatgctaaaggtttgggacttccagtgactctggcttcatcttctgtttctcccgtgaagaaatcgaaatccattcctcagaggttacaaactcctcactgtcaagttgaaggctgtaatcttgatctttcatcagctaaagactatcatcggaaacataggatttgtgaaaatcattcaaagtttcctaaagtcgttgtgagtggcgtagagcgtcggttctgccaacaatgtagcaggttccactgtctctctgagtttgatgagaagaaacgtagctgtcgccgacgtctctcagatcacaatgcaagacgtcgcaagccaaatcctggaaggacatatgatgggaaaccacaggtggattttgtatggaacagatttgcacttatccatccaagaagtgaggaaaagtttatatggccaagttcgaagcacgtaccatcaagagtgttaatgccgcaacctgcaaagactgagatttccgataccgagcacaatagatttggattgttggaccccaaaaccaaaaccgcaagagccgagttattcagtaaagaaaaggtcacaatctcttcacacatgggtgcttctcaagatcttgatggtgctctctctcttctgtcaaattcaacaacatgggtttcttcctctgaccaaccaaggcgttttacccttgatcaccatccctcaagcaacctccaacccgtagctcaccggtctgcggctcaactcaattcagtttccggctattggcagccggacccacccgcagttgaaggcccgaccgctctgcatagaaatggggtaggccagtttaatgaaaactacttcagcttgaaccagttttataactga

SEQ ID NO: 435 - protein, 419 aa, Arabidopsis thaliana
MECNAKPPFQWELENLISFGTSTAEVPRKLKPMEWEIDGFDCTSLYSSSFAYAGSSGSDIAHAFSKSSKSTSISSSSAEVRTHNFTSETGESLPGEFAKGIDTSPSLELSFGSGDPVLGLKLGKRTYFEDFWEVENAKGLGLPVTLASSSVSPVKKSKSIPQRLQTPHCQVEGCNLDLSSAKDYHRKHRICENHSKFPKVVVSGVERRFCQQCSRFHCLSEFDEKKRSCRRRLSDHNARRRKPNPGRTYDGKPQVDFVWNRFALIHPRSEEKFIWPSSKHVPSRVLMPQPAKTEISDTEHNRFGLLDPKTKTARAELFSKEKVTISSHMGASQDLDGALSLLSNSTTWVSSSDQPRRFTLDHHPSSNLQPVAHRSAAQLNSVSGYWQPDPPAVEGPTALHRNGVGQFNENYFSLNQFYN

SEQ ID NO: 436 - DNA, 1410 bp, Oryza sativa
atgggttcttttgggatggactggaatcagaagagctcggtgttgtgggattgggagaatatgccgccgataggaaatagcgcgaacgagaatcccaagaatgtgatgctggctgaatcaaaacttgcaggtgttggggttgacataggccatgaatcaggccattcttctggtggtactttctcttctagctcagagattgggtatggttcatccaagagttccatatccgcgtcgatcgattctccgtccaaagtggggaacaccatagagctcaattttgcatctgcggaagagcatgataagaacatggacaagggtaagagtaaagttgatgacaccggaacttctcgatcaccggtggtagcagccaatcgtgtagagcccttgattggcctgaagcttggcaagagaacctattttgaagatgtctgtggagggcagaatgtcaagagttctccatctggtgtgagtgtggctaccccatctcctggtctggccaagaaggtgaaggtggctcagcagaacactcagaacccacactgtcaagttgaaggctgcaatgttgatctctcttctgctaaaccttaccatcgaaagcaccgagtctgtgaacctcacagcaagactcttaaagtcatcgttgcgggtcttgagcgacgcttttgccaacagtgtagtcggtttcacggtttagctgagttcgaccagaaaaaacgaagctgtcgcaggcgcctccatgatcacaatgcccgcagacggaagccacaaccagaagcaatttccttaagttcgtcgaggctctctacattactctatggtgatgcaaggcaacaggcaagttttctatttggtcaagctccttatggtcagatgggaagctgtgcaagttcttgggataacccagtaccaggaggcttcaaatttacagcaacaaaagctccttggtcaaggccaacaatagctgccggtgttgatgggacgcatgtatctaatcagcaggcatcgggcaatgtactgccacatggagcacatcatagttttgatggtctcatggcgttcaaagaaaccaacgcgaaggtccttaaccaaggcatggaagcttctgctgtcgcttccggctccgctagaggcccagactttgagcatgctctctctcttctgtcaatcgattcagtgggtgctgcaaaccttcagccaggttctcagattcaccctggtgtcaccgccattgccggcacctccaaccctgtcatgatgccatctccagcaatctggcaaggaggcttgtcccttgatcagcaggcgcagtttcaggctttcgaccgccttggcaacgacgacgacgaagatcatctccagctcccaaagccttcctatgacaactcccactatgatcagatgaactga

SEQ ID NO: 437 - protein, 469 aa, Oryza sativa
MGSFGMDWNQKSSVLWDWENMPPIGNSANENPKNVMLAESKLAGVGVDIGHESGHSSGGTFSSSSEIGYGSSKSSISASIDSPSKVGNTIELNFASAEEHDKNMDKGKSKVDDTGTSRSPVVAANRVEPLIGLKLGKRTYFEDVCGGQNVKSSPSGVSVATPSPGLAKKVKVAQQNTQNPHCQVEGCNVDLSSAKPYHRKHRVCEPHSKTLKVIVAGLERRFCQQCSRFHGLAEFDQKKRSCRRRLHDHNARRRKPQPEAISLSSSRLSTLLYGDARQQASFLFGQAPYGQMGSCASSWDNPVPGGFKFTATKAPWSRPTIAAGVDGTHVSNQQASGNVLPHGAHHSFDGLMAFKETNAKVLNQGMEASAVASGSARGPDFEHALSLLSIDSVGAANLQPGSQIHPGVTAIAGTSNPVMMPSPAIWQGGLSLDQQAQFQAFDRLGNDDDEDHLQLPKPSYDNSHYDQMN

SEQ ID NO: 438 - DNA, 1428 bp, Oryza sativa
atggcttcttttgggatgaactggaatcagaagagccctgtgttttgggactgggaaaatccagcgcctttcggtccgaatacaatggaaaatcccaagagcatacctcaccctgaaccaagaggtgtagttgtcgcggccgcaaatcatggatccaccaattcatccggtggcacgttcacttctagctcggagctagccaatggttcatcgaagagctccttgtcagcgtcgttcgattcctcatccaagctggggaacagcttagagttcaggtttgcttctgtcaaagggcatggcaagaacatgtgcaaggatggcgaggccggtagagttgaagactcgggcacttctccagctgtggcagttagccatggtgagccggtaataggactcaagttagggaagagaacttactttgaaaatgtttgtggagggcagaatgtcaagagctcctctgcagcttcaggtgtgacttgtccatctactgtggtcaagaagatgaaggtgtctcagcagagcacacaaagctcatactgccaagttgaaggctgcaaagtcgatctgtcctccgcaagagaataccatcgcaagcacaaagtttgtgaagctcattctaaggcaccaaaggttattgtttctggtctggagcgccgtttttgccaacagtgtagtcggtttcatggtttagctgaatttgaccagaaaaagaaaagttgccgcaggcgtctatctgatcataatgcacgaagaaggaaaccgcaacaagaggcaatttcatttggttcatcaaggctcgccacgatgttttacgatgcaaggcagcagacagatatttactttggccaatctccttttggccaagtgagaagcaatgcaatttcttcatgtgacaacctgggaggcttcaaatttacagaagcaaaactcccctggatgaagccaatgaaaactataggccttgaggatctgaatttctctaccctgcagatgccaggcaatgttgtgtcgcatacggtgcatcatcatgattttgatgggctcataccattcaagggaaacaccccgaaggtcctcaaccaaggtgtggatccagcctgtgccgtcgtgtcctccaactcgaatggagccccggatcttcggcgtgctctctctcttctgtcaagcgattcctggggcccggccgacgttcaggccggctcccaggtgcatcccggtggagtgatgccgcccctcgccgttgccgccgccaccgtcaccgccccgacgaaccctgtcagtgtgatgcatgctctgcacccgtccaccggaggaggaggattctggcaagacggcgacgacccgcctccgctcgatcatgcctcgcaggctcaggcgttcatgcatcctggcaatggcagcagctccggctatggccatctgcactga

SEQ ID NO: 439 - protein, 475 aa, Oryza sativa
MASFGMNWNQKSPVFWDWENPAPFGPNTMENPKSIPHPEPRGVVVAAANHGSTNSSGGTFTSSSELANGSSKSSLSASFDSSSKLGNSLEFRFASVKGHGKNMCKDGEAGRVEDSGTSPAVAVSHGEPVIGLKLGKRTYFENVCGGQNVKSSSAASGVTCPSTVVKKMKVSQQSTQSSYCQVEGCKVDLSSAREYHRKHKVCEAHSKAPKVIVSGLERRFCQQCSRFHGLAEFDQKKKSCRRRLSDHNARRRKPQQEAISFGSSRLATMFYDARQQTDIYFGQSPFGQVRSNAISSCDNLGGFKFTEAKLPWMKPMKTIGLEDLNFSTLQMPGNVVSHTVHHHDFDGLIPFKGNTPKVLNQGVDPACAVVSSNSNGAPDLRRALSLLSSDSWGPADVQAGSQVHPGGVMPPLAVAAATVTAPTNPVSVMHALHPSTGGGGFWQDGDDPPPLDHASQAQAFMHPGNGSSSGYGHLH

SEQ ID NO: 440 - DNA, 1155 bp, Populus spp.
atgagttctgtctcactgatggagtggaatggcaaaccccacttgcagtgggactgggaaaacctgataatgttcaatgcaataacaaatgaaaattcaaagcagttaagcctaacagatttggaaactgatggagaaaaaggaaatgattctgggtttttctattcatctgggagtgtaagcagaagccgtggatctatctctgacttagaacttgcttctttctcaaagagctcgaagtcagcttccaccaattcttcatcagctggggaagttaaaacatccaaattcactttgggggcctctaaaacaaatccatcagattacaataaggaagaacttgtgaaggctaaggcaactgatacttctcccacgcttgaagcttcagttggttcaggtgaccagctgcttggtttgaagcttggtaaaagaacttactttgaagatgcttgtgctgggagcaatgctcagtcttcatcaatatctacgattcctgtgccttcttttactccagcaaagaaattgaagtccagtaatcatagtcagcgtgctccacgctgtcaagtagaaggctgtaaccttgacctctcatcagctaaagattaccatcgcaaacatagagtttgtgaaagccattcaaagtgcccaaaggtcattgtagctggtttggaacgcaggttttgccagcagtgtagcaggttccatggtctgtcagagtttgatgaaaagaagaaaagctgccgcaggcgactttctgatcacaatgcaagacgccgcaaacagccaggatctgtccatttgaatccttcaagactttcttcatcattatatgatgagaggcaacagatgagtcatgtttgggacaaggcgccacttgttcattccaggcccaatgcaaatttgacatgggaaagcacatccacctccaagttcacaataacaaaagagtatatagcaaagcctgcagaaataggtggtagtgataggaggctccacttgcctggcattgatctgacaaatagcattgctattcagcaccatcataagtctaatggcttcttaccatccaaggccaagggcactgcaggtgaggttctcaaccaaggtttgttttgtcttcattttgagaaacaagcctcacaattattgcattga

SEQ ID NO: 441 - protein, 384 aa, Populus spp.
MSSVSLMEWNGKPHLQWDWENLIMFNAITNENSKQLSLTDLETDGEKGNDSGFFYSSGSVSRSRGSISDLELASFSKSSKSASTNSSSAGEVKTSKFTLGASKTNPSDYNKEELVKAKATDTSPTLEASVGSGDQLLGLKLGKRTYFEDACAGSNAQSSSISTIPVPSFTPAKKLKSSNHSQRAPRCQVEGCNLDLSSAKDYHRKHRVCESHSKCPKVIVAGLERRFCQQCSRFHGLSEFDEKKKSCRRRLSDHNARRRKQPGSVHLNPSRLSSSLYDERQQMSHVWDKAPLVHSRPNANLTWESTSTSKFTITKEYIAKPAEIGGSDRRLHLPGIDLTNSIAIQHHHKSNGFLPSKAKGTAGEVLNQGLFCLHFEKQASQLLH

SEQ ID NO: 442 - DNA, 1398 bp, Populus spp.
atggagtggaatggcaaaccccacttacagtgggactgggagagcctgataatgttcaatggaataacaactgaaaattctaagcagttaagcccaacagatttggaaactgatggagaaaaaggaaccgactctgggtttttctattcatctgggagtgcaagcagaagcggtggttctagctctgatttggaacttgcttctttctcaaagtgctcgaagtcagcttccatcaattcttcatcagctggggaagttaaaacatccaaattcactttggaggcctctaaagcaaatccatctgattacaataagaaagaaattggaaaggctaagacagctagtatgtcttccacaattgaggctgcaggtggttcaggtgaccagctgcttggtttgaagcttggtaaacgaatatactttgaagatgcttgtgctggcaacaatgttcagtcgtcatcattttctacagttcctgtgccctcttttacttcagcaaagaaattgaagtccactattcagagtcagcgtgctccatgctgtcaagtggaaggctgtaaccttgacctctcatcagctaaagattatcatcgcaaacatagagtttgtgaaagccattcaaagtgccagaaggtcattgtagctggtttggaacgcaggttttgccagcagtgtagcagtaagattattcctagcttttatgattgcattgacaatttgggttttggatgtcaaaggttccatggcctgtcagagttcgatgaaaagaagaaaagctgtcgcaggcgactttctgatcacaatgcaagacgccgcaaacaaccaggatcggtccatttaaattcaagagtgtcttcatcattatatgatgaaaggcaacagatgagtcttgcttgggacagggcaccacttgttcatgccaggcctaatgcaaatttgacgtgggaaggcacatacatctccaagttcacaataacaaaagattatatagcaaagcctgcagaaataggtggtaatgatgggcagtttcacttgcctggctttgatctgacaaatggcattgatattcagcaccatcataagtctaatagctccttaccatctaaaggtaagggcactgcagctgagattctcaaccaaggtttggaagaatacatcattccttccaaagcggaagcagcaccagaatctcatcgtgctctctctcttctgtcaaacaattcatggggttcacgtgagccgcaatctatttcatttgaacaacccgtgcatacaaatcacaccactcagtctgtgctgcaagttataccccaaaactcaccacttgcttcatcagagtattggaggactgagcaaccgtcaactgactctcaagtgcataccttgacgtctcactga

SEQ ID NO: 443 - protein, 465 aa, Populus spp.
MEWNGKPHLQWDWESLIMFNGITTENSKQLSPTDLETDGEKGTDSGFFYSSGSASRSGGSSSDLELASFSKCSKSASINSSSAGEVKTSKFTLEASKANPSDYNKKEIGKAKTASMSSTIEAAGGSGDQLLGLKLGKRIYFEDACAGNNVQSSSFSTVPVPSFTSAKKLKSTIQSQRAPCCQVEGCNLDLSSAKDYHRKHRVCESHSKCQKVIVAGLERRFCQQCSSKIIPSFYDCIDNLGFGCQRFHGLSEFDEKKKSCRRRLSDHNARRRKQPGSVHLNSRVSSSLYDERQQMSLAWDRAPLVHARPNANLTWEGTYISKFTITKDYIAKPAEIGGNDGQFHLPGFDLTNGIDIQHHHKSNSSLPSKGKGTAAEILNQGLEEYIIPSKAEAAPESHRALSLLSNNSWGSREPQSISFEQPVHTNHTTQSVLQVIPQNSPLASSEYWRTEQPSTDSQVHTLTSH

SEQ ID NO: 444 - DNA, 1419 bp, Populus spp.
atggactggaactccactgcatctgaggggaactgggagaacatagcagggttaagtgccaaggctagtgacattccaaaacaagtaccattggcataccatgagacagagggagatggagcaattgataaagcaataacttattcgtctggtggtggtttatcaagctctgatttgtggcattgctcttcatccaagagctcagtttcaccctctgtcgactcttcattgaagggggggatcaagacttatagcactgcagatggttttcctggagttatcattagaaaggacttgactagggtagaaagtactgagaatattccatctctgggtgcttctgctagctctggtgaaccagtaattggcttgaagcttggtaaacggatgtactttgaagacatttgtactaccagcactgccaaatcatcgtcttcatctattgtttccacttcctgtactgctacaacaaagagatctagggcatcatatccaagtacacagtctccacgttgccaagtggaaggatgcaaccttgatctcaagtcagctaaagattaccatcgcaggcatagaatctgtgaaaaacattccaaaagcccaaaggttattgttgctggcatggaacgccgattttgccaacagtgcagcaggttccatgaattatcagagtttgatgacaagaagcgaagctgtcgtagacgtctctctgatcacaatgcaaggcgacggaggccacaacctgaggcaatccggttcaattcagcaaggccatcatcatcaccatcatcattttatggttgtcatttcaatttcaaagatggtagacagcagatgaatgttgtattgaatagggtgcctttcctggcaggaaattcaacttggcaaagcgagtgcggctttaaagtcactcacgccggagatttttttattaggcctgcaaaagcagggggcatccataggcagcttagctatccctgcaatgaagtgccagatgcagcttcaacaataccaacagactcggataaaattatctcttttgagagaagtacaccccaggtctttagtcaaggtttcgaggggtctgcattaacttctaacattgaggtagcaccagatcttcggcgtgctctctctcttctgtcaaccacttcttggggctcgaatgagcatggatccacctctctggatcaactgatgcttgcaaaccaaacaagcatgacacagccaatgataaatgctgaactccaaaattgtccagttgcttcatcagaaaatgcacggatggaacaagcatcccttgagtctcgggtgcattctttggatttacatgacaatggaaacgtccagttgcaagagtttcagctgctcaaagcaccctatgctaccggctgcttttattccaatcaattcagctaa

SEQ ID NO: 445 - protein, 472 aa, Populus spp.
MDWNSTASEGNWENIAGLSAKASDIPKQVPLAYHETEGDGAIDKAITYSSGGGLSSSDLWHCSSSKSSVSPSVDSSLKGGIKTYSTADGFPGVIIRKDLTRVESTENIPSLGASASSGEPVIGLKLGKRMYFEDICTTSTAKSSSSSIVSTSCTATTKRSRASYPSTQSPRCQVEGCNLDLKSAKDYHRRHRICEKHSKSPKVIVAGMERRFCQQCSRFHELSEFDDKKRSCRRRLSDHNARRRRPQPEAIRFNSARPSSSPSSFYGCHFNFKDGRQQMNVVLNRVPFLAGNSTWQSECGFKVTHAGDFFIRPAKAGGIHRQLSYPCNEVPDAASTIPTDSDKIISFERSTPQVFSQGFEGSALTSNIEVAPDLRRALSLLSTTSWGSNEHGSTSLDQLMLANQTSMTQPMINAELQNCPVASSENARMEQASLESRVHSLDLHDNGNVQLQEFQLLKAPYATGCFYSNQFS

SEQ ID NO: 446 - DNA, 2042 bp, Brassica rapa
atggagtgtaatgcaaagccatcattgcagtgggagtgggataatctaatatcttttggtacttcatcagctgaaattcctaaaaagcaacgaccaatggattgggaaaatgatgggtttgattgcaccactttttactcgtccagctttgctacagaagcagcttatggtggtggtagttcaggttctgatctagctcatgctttctctaaaagctcaaagtcaacttccataagctcttcatcagctgaagtgagaacatacaatttcacatcagaagctggtgaaagtgttcctcctggagaattggggagcagtgaagagtttgcaatgggaattgatgcttctccaagtcttgaactctccttcggctctggtgatccggttcttggtttgaagcttggtaagaggacatactttgaagacttttgggaagtggagaatgctaaaggttcagcacttccggtgagcctggcgtcatcttctgcttctccggtgaagaaatccaaaacactctctcagaaattacaaactcctcactgccaagttgaaggctgtaacctcgatctctcctcagctaaggactatcataggaaacacaggatttgtgaaaaccattcaaagttccctaaagtcgttgtcagtggcgtagagcgccggttctgccaacaatgtagcaggtagaaaagctagtcttagagatattggtttatacaaaagccttaatgactttttttaattgtttttggtcttcaaaggtttcactgtctctctgagtttgatgagaagaaacgtagctgtcgccggcgtctctcagatcacaatgcaagacgtcgcaagccaaatcccgggaggacatatggtaatatactagattcacttctctctaatcctatatattaaatctaaatttttagttatataattagtaggtttcccttttctaagataaatatcattctgtatgtgcagatgggaagcaacagatggattttgtatggaacagatttgcacttatccatccaagaagtgaagaaaattttctgtggccaaatccgaagcctgtatcatcaagagggttattgcaggaacctgcaaagaccgagatgcccaataagcttttcaccgagcattgtggatttggattgttggaccccaaaacgaaaaccaccagagctgagttattcagtaaaggtttgtgtttttctttgctgtttaatatattttctcttgttgtattcatgatcttgatgattgcttgttttatgcagatttgttagaaaaggtcacaatctcttcttcacacatgggtgcttctcaagatcttgatggtgctctctctcttctgtcaaattcaacaccatgggtttcctcgaaccagccaacacggttttcccttaaccaccattccacaagcaacctccaacccgtggttcacgggtctgtgactcaactcagttcagtgtccagctactggcagccggacccaccagcagctgagggctcaaccgctttgactaggaatggggtaggccagtttaatgagaactacaacttgaatcagttttataactgaaagtgtgttgcttttaaaatcataataagatattttgtgtaaggatcaggtgagcctagtggtaacgtttaaataggagctgtgaaacttgctaaagacatcaactcctctcgtctttcttttgtccattgattttcttgggttagggagagttgtgacagttaagtattataaatcatcttgtcaaattatttatacattagaattttcagatattgatggtgtagcaactgaaaaattgatcaaacgcatcataatatacgtatgataaggttatttgcatctgaactttttttatattcgcattagtcagcattttgtgttatactagatttggatccgtgcgttgcaacaggttttatttgatattaccatccattgatttttttttttttttgcaaacaaataatttggtaattccattaaccgccacagtcgttttctgagcaaaaccatgttaaaatct

SEQ ID NO: 447 - protein, 282 aa, Brassica rapa
MECNAKPSLQWEWDNLISFGTSSAEIPKKQRPMDWENDGFDCTTFYSSSFATEAAYGGGSSGSDLAHAFSKSSKSTSISSSSAEVRTYNFTSEAGESVPPGELGSSEEFAMGIDASPSLELSFGSGDPVLGLKLGKRTYFEDFWEVENAKGSALPVSLASSSASPVKKSKTLSQKLQTPHCQVEGCNLDLSSAKDYHRKHRICENHSKFPKVVVSGVERRFCQQCSRKSSRYWFIQKPLFLIVFGLQRFHCLSEFDEKKRSCRRRLSDHNARRRKPNPGRTY

SEQ ID NO: 448 - DNA, 1684 bp, Zea mays
agccgcttcggcaggcaagtaggacgaggagcagcagctcagatttcggatcctggcactggcaactggcatgggctcgtttgggatggacatggactggaaccagaaggcctccgtgctgctgtgggactgggagaacctgccgcccgcagccgcaaacgggagcgagagccacaggacgaccgctgccgcgcctcagttcgcgggccttgaggccacagggcatgaaccggcgccttcttccgtatcctcgtcaatccattctctgcccagtgccaaggggaacaagaacaagaacaacatggagctcatcagtttcgcacctgccaaagcgcccgacaaggacactggttcggtgctcagcagcggagagccggtggtgctaggcctgaagcttggcaagagaacgtatttcgaagatggttgtggactagggcagagcggcaagagttcggcggcgttaggcactgccagtgcagcgacccctccgggtcctgcgaagaaggcgaaggcggcggcggcggctccaaccgcgcagcagcagaaatcgtactgccaggttgaaggctgcaggaccgatctgtcctctgctaaagactatcatcgcaagcacagagtctgcgagccccattccaaggcgcccaaggtggtcgtcgctggcctggagcggcgcttctgccagcagtgcagccggttccatggactggccgagttcgaccagaagaagaagagctgccgcaggcgactcaacgaccacaacgcgcgcaggcggaagccccagcccgaagcgctccctttcggctcatcgaggctgtcggcgatgttctatgacacgaggcgccaggcgagcctcctgtttggtgaaggtccctacggtcagatgagaagctgtgcgagttcttggtgggatagcccaggagcaggaggaggaggcttcaaattcgcggagacgagaggagctccttggttgaagccggcgagagctgctgctgatgggctgctgcctttgtcaggtcagcagcagcagcaggtgtggaatgactcgattccgcatgttgcccatcaggaggatttcgatgggttcacggtcacggcgttcaaaggaatcagtccaaagacccttgatcatcaaggcgcaggcgttgaagcctgtgcggccgtctccagcccggacggcgccccggaccttcagcgtgctctctctcttctgtcaaacagtccggccggtggcggcggcaccaacaccaaccacccgccgccgccgccggcggctgagctgcaccaccaccgcgctgccccgagcagctgcctcgccgccggctccgtctccgtgctgcaggaggcctcgtcgccggggctgtggcaggacggcggcggcagcgcggccctgggccaccacgcgcacgcgcggctccaggctctcgacgccgccatggcgacggcgcaggagctcctccagctccccaggccgccgccatcgtacggcggctcctcgtcccactacgacctgatgcgctgatgcttccttccttgtggattgtggtggagaactggagatggagcgggagcgccgccgtgcccccggttggcgcgtggaaatcagtcagacgtggcttctgtggcgtcgtctctgcaacgcgggagcgggattttgcttgtgttctgaacgaacagaaaaaaaaaa

SEQ ID NO: 449 - protein, 482 aa, Zea mays
MGSFGMDMDWNQKASVLLWDWENLPPAAANGSESHRTTAAAPQFAGLEATGHEPAPSSVSSSIHSLPSAKGNKNKNNMELISFAPAKAPDKDTGSVLSSGEPVVLGLKLGKRTYFEDGCGLGQSGKSSAALGTASAATPPGPAKKAKAAAAAPTAQQQKSYCQVEGCRTDLSSAKDYHRKHRVCEPHSKAPKVVVAGLERRFCQQCSRFHGLAEFDQKKKSCRRRLNDHNARRRKPQPEALPFGSSRLSAMFYDTRRQASLLFGEGPYGQMRSCASSWWDSPGAGGGGFKFAETRGAPWLKPARAAADGLLPLSGQQQQQVWNDSIPHVAHQEDFDGFTVTAFKGISPKTLDHQGAGVEACAAVSSPDGAPDLQRALSLLSNSPAGGGGTNTNHPPPPPAAELHHHRAAPSSCLAAGSVSVLQEASSPGLWQDGGGSAALGHHAHARLQALDAAMATAQELLQLPRPPPSYGGSSSHYDLMR

SEQ ID NO: 450 - DNA, 1320 bp, Zea mays
atgggttcttttgggatgaactggaatcagaaggaccccatggtgtgggattgggaacatctagtaccgtctgtctcaaatgcagttacaaggcacggatctgctaattcatctggtggtactcttacttctaactcagagctagggcatggttcatccaagagctctatttcagcgtccattgattcaccctctggagtagggaacagcttagagttcaacttcgccgctgttgagaggcatgttaagaacacgggcacgaacggcagagtcgatgactcggggaattctccatcgtcaatgatagctttcaaccaaggagagccattaatcagcctgaaacttgggaagagggcttacttcgaaaacgcctgcggaggacaggatgccaaggtttctgcagcttcagacgttacttctgcagccagcgtggtcaagaagactaaggtgtctcagcagaatgcaaagaactggtactgtcaggttgaagggtgcaaagttgacctgtcttctgctaaagattacaatcgcaagcacaaggtctgtgtagtccattctaaagctaccaaggtggttgttgctggtctagagcgtcggttttgtcaacagtgtagccgttttcatggtttagcggagtttgatcagaacaaacgaagctgtcgtaggcgtctgatgcatcataatgcacggaggaggaaacctcaggcagacacaatttcattcaattcatcgacaatgttttatgatacaaggcagcggacaaatcttttctttagtcaaccactttatggccaagtgaggagcaatgcagggtcttcatgggataacttgggaggcttaaaattcatggagacgaaacatccgccagtgcatccaacaaaaacagcatcccctgatgaactgcatttctcagccctccagataactagtgctgcggctcacaccggacatcatcatgatctcgatgggttcatggcgttcaagggaaccagcacaaaggtccttaaccaaggcgtggaggcttgggcggccgcttccagctcgaacaacggaggcccagaaggtgggcgtgctctctctcttctgtcagacggctcgtggggctcgagttcagccgtcatccagcagcccacatctcacgcggacgccggtgcattgctgccgcccctcgccaccgttgccgtctccaacgccgccgccgccgccgggcatcctctggacccgtccccgggaaggttctggccgcaagacgatcatcccccgctcgtcgacggacccgccacgcagattccggagctggcgcacctccggatatggtga

SEQ ID NO: 451 - protein, 439 aa, Zea mays
MGSFGMNWNQKDPMVWDWEHLVPSVSNAVTRHGSANSSGGTLTSNSELGHGSSKSSISASIDSPSGVGNSLEFNFAAVERHVKNTGTNGRVDDSGNSPSSMIAFNQGEPLISLKLGKRAYFENACGGQDAKVSAASDVTSAASVVKKTKVSQQNAKNWYCQVEGCKVDLSSAKDYNRKHKVCVVHSKATKVVVAGLERRFCQQCSRFHGLAEFDQNKRSCRRRLMHHNARRRKPQADTISFNSSTMFYDTRQRTNLFFSQPLYGQVRSNAGSSWDNLGGLKFMETKHPPVHPTKTASPDELHFSALQITSAAAHTGHHHDLDGFMAFKGTSTKVLNQGVEAWAAASSSNNGGPEGGRALSLLSDGSWGSSSAVIQQPTSHADAGALLPPLATVAVSNAAAAAGHPLDPSPGRFWPQDDHPPLVDGPATQIPELAHLRIW

SEQ ID NO: 452 - DNA, 1422 bp, Triticum aestivum
atgggctcgttcgggatggagtggaaccagaggagctcggtgctgtgggactgggagaatttcccgccgataggcgagaaccccaagaacgcgatgcaggccgatccaagatttgccgccgttgcggctaccatggggaatgaaccgctccattcttctggcggtagcggcaccttctcttccagctcagagatggggtatggctcttccaagagctccatgtccgcgtcgatcgattcttcgaacagggctgggaacaacatggagttcagatttgcgcctgtcaaaaaccctgataggaacacgagcaagaacaccgagctgggtaaagttgataacacgagaactggaacatctccgtcgcctgtggtggcagtgagcagtggagagccggtgatcggcctgaagcttggcaagagaacttacttcgaggatgtctgtggagggcagaatgtcaagagctcgccatcgggtgctgcgagcgcgccaaacaaatctcctgctttgggcaagaaggcaaaggcggaacaacagaagccacataactcgtactgtcaggttgaaggctgcaaagtcgacctctcttctgttaaagattaccatcgaaagcacagagtctgtgaacttcactctaaggctccgaaagttgttgtcgctggtctggagcgacgcttttgccaacagtgcagccggtttcatgctttagctgagtttgaccagaaaaagcgaagctgccgtaggcgtctcaatgatcataattcccgcaggcggaagccacagccagaagcaatttctttcagttcatcaaggatgtctacgatgttttatgatgcaaggcaacagccaaatttcctatttggtcaggctccttatgttcaaatgagaagctgtggaagttcttcatgggatgacccaggaggcttcaaagttacacacacaaaagctccttggttaaaaccaacaactgctgcaggtgttcatgggatacatttatctagtcagcagatgtcggacaatattatgccacatggtgcacatcatggtttcgatgggttcatggcattcaagggaacttgtacaaagttccctaatcaaggtgtccaagcttctgctgttgcttccgactccagtggagccccggatcttcagcatgctctctctcttctgtcaagcaacccagtgggtgctgccaacctccagccaagtccccagatgcactctggggtggcagccattgccggcgcccccaaccccgcgatgcacgcgctgggatcatcgacggggctctggctagacggcagccagcccctcgatgatcacccgcggttccaggtcttcgagcgcttgggggaccatgacagcgagctccagctcccaaagccttcctacgaccatgcctcgcacttcgaccggatgcactga

SEQ ID NO: 453 - protein, 473 aa, Triticum aestivum
MGSFGMEWNQRSSVLWDWENFPPIGENPKNAMQADPRFAAVAATMGNEPLHSSGGSGTFSSSSEMGYGSSKSSMSASIDSSNRAGNNMEFRFAPVKNPDRNTSKNTELGKVDNTRTGTSPSPVVAVSSGEPVIGLKLGKRTYFEDVCGGQNVKSSPSGAASAPNKSPALGKKAKAEQQKPHNSYCQVEGCKVDLSSVKDYHRKHRVCELHSKAPKVVVAGLERRFCQQCSRFHALAEFDQKKRSCRRRLNDHNSRRRKPQPEAISFSSSRMSTMFYDARQQPNFLFGQAPYVQMRSCGSSSWDDPGGFKVTHTKAPWLKPTTAAGVHGIHLSSQQMSDNIMPHGAHHGFDGFMAFKGTCTKFPNQGVQASAVASDSSGAPDLQHALSLLSSNPVGAANLQPSPQMHSGVAAIAGAPNPAMHALGSSTGLWLDGSQPLDDHPRFQVFERLGDHDSELQLPKPSYDHASHFDRMH

SEQ ID NO: 454 - DNA, 1491 bp, Vitis vinifera
atggatgctgttgttttgacaggtttggaagaatctggggtaagagtaagggtggttaattttatacagggcgggcgagaaatggcatttttgttggaatctgtgcaagaagaggacttgggtagaaacatcatcggttctacttggtcgacttggggaagaaaggacaatcgatatccttctctaaaaggggataaggaatttcctttctgtggcatgtgggactgggagaaccttgacattttcaatgcaaaatcaactgaaattccaaaaaagttacaatcagactgggaaattgaaggagaaggaggaattgacactggttctttctattcatctggatgtggtgctggtagtggtggttctggctctgatttgggacatgcatattcatcaaagagctcaaaatcagcttcaattgattcttcatcaaaggtgggaataaagacatccaacttcacttttgaggctttccaagatttttctcaagattttaacaagaagagagatttggagagggctgagccaactggaagttctccaaaccttgaagcctcgattggctctggtgaacctttaattggtctaaagcttggtaaaaggacatacttcgaggatgtttctgcagggggcaatgctaagggctcagtgttttctgtgattcccatatcatctgataccacagcaaagagatccaggttatcttgtcagaatgcacatgtctcgcgctgccaagttgaaggatgcaaccttgacctttcaacagccaaagattaccatcgcaaacatagagtttgtgaaagtcataccaaatgcccaaaggtcattgtaggtggtctggagcgccgtttttgccaacagtgtagcaggttccatagtttgtcagagtttgatgaaaagaagagaagctgtcgcaggcgtctttctgatcacaatgcacgccggcgcaaaccacaaccagaagggatccagtcaaattcggcgaggctttcatcattctatggtgggaagcagcaaatgagtcttgtgttgagctcggtccccattgttcatacaaggcctgctgtaaatccttcatgggaaggcacatgcagcaagttcacacaaacaaaagggttagtaaggcctggtaacacaggaggtatcgaccggcagctgcatttgcctggcagtgagctgcagaatggcattagtacgctttgtcatgattccagtaggcttttgcactctaagggcgcaatagctgaggttctcaatcaagtgtcccaaggtatgttacattcaacctcagaacactggaggaccgagcttccctcaactgattcccgggtgcatatcttgccttcacaaggcgatggtaacacccactttcaagagttcaagctgttcaaagcgccatacgagtctggcttttcttctggatattcagagtatagggaattgagatatccgattcctaggagtaacgcccgtgtcatgaagcaaacatag

SEQ ID NO: 455 - protein, 496 aa, Vitis vinifera
MDAVVLTGLEESGVRVRVVNFIQGGREMAFLLESVQEEDLGRNIIGSTWSTWGRKDNRYPSLKGDKEFPFCGMWDWENLDIFNAKSTEIPKKLQSDWEIEGEGGIDTGSFYSSGCGAGSGGSGSDLGHAYSSKSSKSASIDSSSKVGIKTSNFTFEAFQDFSQDFNKKRDLERAEPTGSSPNLEASIGSGEPLIGLKLGKRTYFEDVSAGGNAKGSVFSVIPISSDTTAKRSRLSCQNAHVSRCQVEGCNLDLSTAKDYHRKHRVCESHTKCPKVIVGGLERRFCQQCSRFHSLSEFDEKKRSCRRRLSDHNARRRKPQPEGIQSNSARLSSFYGGKQQMSLVLSSVPIVHTRPAVNPSWEGTCSKFTQTKGLVRPGNTGGIDRQLHLPGSELQNGISTLCHDSSRLLHSKGAIAEVLNQVSQGMLHSTSEHWRTELPSTDSRVHILPSQGDGNTHFQEFKLFKAPYESGFSSGYSEYRELRYPIPRSNARVMKQT

SEQ ID NO: 456 - protein, 79 aa, Artificial sequence
  sbp domain of SEQ ID NO: 2
RCQIDGCELDLSSAKGYHRKHKVCEKHSKCPKVSVSGLERRFCQQCSRFHAVSEFDEKKRSCRKRLSHHNARRRKPQGV

SEQ ID NO: 457 - protein, 79 aa, Artificial sequence
  sbp domain of SEQ ID NO: 7
RCQIDGCELDLSSSKDYHRKHRVCETHSKCPKVVVSGLERRFCQQCSRFHAVSEFDEKKRSCRKRLSHHNARRRKPQGV

SEQ ID NO: 458 - protein, 79 aa, Artificial sequence
  sbp domain of SEQ ID NO: 9
HCQVEGCNLDLSSAKDYHRKHRICENHSKFPKVVVSGVERRFCQQCSRFHCLSEFDEKKRSCRRRLSDHNARRRKPNPG

SEQ ID NO: 459 - protein, 79 aa, Artificial sequence
  sbp domain of SEQ ID NO: 11
HCQVEGCNVDLSSAKPYHRKHRVCEPHSKTLKVIVAGLERRFCQQCSRFHGLAEFDQKKRSCRRRLHDHNARRRKPQPE

SEQ ID NO: 460 - protein, 79 aa, Artificial sequence
  sbp domain of SEQ ID NO: 13
YCQVEGCKVDLSSAREYHRKHKVCEAHSKAPKVIVSGLERRFCQQCSRFHGLAEFDQKKKSCRRRLSDHNARRRKPQQE

SEQ ID NO: 461 - protein, 108 aa, Artificial sequence
  sbp domain of SEQ ID NO: 15
TPAKKLKSSNHSQRAPRCQVEGCNLDLSSAKDYHRKHRVCESHSKCPKVIVAGLERRFCQQCSRFHGLSEFDEKKKSCRRRLSDHNARRRKQPGSVHLNPSRLSSSLY

SEQ ID NO: 462 - protein, 98 aa, Artificial sequence
  sbp domain of SEQ ID NO: 17
CCQVEGCNLDLSSAKDYHRKHRVCESHSKCQKVIVAGLERRFCQQCSSKIIPSFYDCIDNLGFGCQRFHGLSEFDEKKKSCRRRLSDHNARRRKQPGS

SEQ ID NO: 463 - protein, 98 aa, Artificial sequence
  sbp domain of SEQ ID NO: 19
DLKSAKDYHRRHRICEKHSKSPKVIVAGMERRFCQQCSRFHELSEFDDKKRSCRRRLSDHNARRRRPQPEAIRFNSARPSSSPSSFYGCHFNFKDGRQ

SEQ ID NO: 464 - protein, 79 aa, Artificial sequence
  sbp domain of SEQ ID NO: 21
TLSQKLQTPHCQVEGCNLDLSSAKDYHRKHRICENHSKFPKVVVSGVERRFCQQCSRKSSRYWFIQKPLFLIVFGLQRF

SEQ ID NO: 465 - protein, 82 aa, Artificial sequence
  sbp domain of SEQ ID NO: 23
SYCQVEGCRTDLSSAKDYHRKHRVCEPHSKAPKVVVAGLERRFCQQCSRFHGLAEFDQKKKSCRRRLNDHNARRRKPQPEAL

SEQ ID NO: 466 - protein, 75 aa, Artificial sequence
  sbp domain of SEQ ID NO: 25
CQVEGCKVDLSSAKDYNRKHKVCVVHSKATKVVVAGLERRFCQQCSRFHGLAEFDQNKRSCRRRLMHHNARRRKP

SEQ ID NO: 467 - protein, 85 aa, Artificial sequence
  sbp domain of SEQ ID NO: 27
YCQVEGCKVDLSSVKDYHRKHRVCELHSKAPKVVVAGLERRFCQQCSRFHALAEFDQKKRSCRRRLNDHNSRRRKPQPEAISFSS

SEQ ID NO: 468 - protein, 81 aa, Artificial sequence
  sbp domain of SEQ ID NO: 29
RCQVEGCNLDLSTAKDYHRKHRVCESHTKCPKVIVGGLERRFCQQCSRFHSLSEFDEKKRSCRRRLSDHNARRRKPQPEGI

SEQ ID NO: 469 - protein, 6 aa, Artificial sequence
  motif 1
WDWENL

SEQ ID NO: 470 - protein, 12 aa, Artificial sequence
  motif 2
SKSSQSTSINSS

SEQ ID NO: 471 - protein, 7 aa, Artificial sequence
  motif 3
ALSLLST

SEQ ID NO: 472 - protein, 6 aa, Artificial sequence
  motif 4
LKLGKR

SEQ ID NO: 473 - DNA, 56 bp, Artificial sequence; identical to SEQ ID NO: 177
  primer 1

SEQ ID NO: 474 - DNA, 54 bp, Artificial sequence; identical to SEQ ID NO: 178
  primer 2

SEQ ID NO: 475 - DNA, 9 bp, Artificial sequence
  promoter box
  misc_feature (2)..(2): n is a, c, g, or t
tncgtacaa

SEQ ID NO: 476 - DNA, 2194 bp, Oryza sativa; identical to SEQ ID NO: 10

SEQ ID NO: 477 - DNA, 1827 bp, Oryza sativa
gcttgagtcatagggagaaaacaaatcgatcatatttgactcttttccctccatctctcttaccggcaaaaaaagtagtactggtttatatgtaaagtaagattctttaattatgtgagatccggcttaatgcttttcttttgtcacatatactgcattgcaacaattgccatatattcacttctgccatcccattatatagcaactcaagaatggattgatatatcccctattactaatctagacatgttaaggctgagttgggcagtccatcttcccaacccaccaccttcgtttttcgcgcacatacttttcaaactactaaatggtgtgttttttaaaaatattttcaatacaaaagttgctttaaaaaattatattgatccatttttttaaaaaaaatagctaatacttaattaatcacgtgttaaaagaccgctccgttttgcgtgcaggagggataggttcacatcctgcattaccgaacacagcctaaatcttgttgtctagattcgtagtactggatatattaaatcatgttctaagttactatatactgagatgaatagaataagtaaaattagacccaccttaagtcttgatgaagttactactagctgcgtttgggaggacttcccaaaaaaaaaagtattagccattagcacgtgattaattaagtactagtttaaaaaacttaaaaaataaattaatatgattctcttaagtaactctcctatagaaaacttttacaaaattacaccgtttaatagtttggaaaatatgtcagtaaaaaataagagagtagaagttatgaaagttagaaaaagaattgttttagtagtatacagttataaactattccctctgttctaaaacataagggattatggatggattcgacatgtaccagtaccatgaatcgaatccagacaagttttttatgcatatttattctactataatatatcacatctgctctaaatatcttatatttcgaggtggagactgtcgctatgtttttctgcccgttgctaagcacacgccacccccgatgcggggacgcctctggccttcttgccacgataattgaatggaacttccacattcagattcgataggtgaccgtcgactccaagtgctttgcacaaaacaactccggcctcccggccaccagtcacacgactcacggcactaccacccctgactccctgaggcggacctgccactgttctgcatgcgaagctatctaaaattctgaagcaaagaaagcacagcacatgctccgggacacgcgccacccggcggaaaagggctcggtgtggcgatctcacagccgcatatcgcatttcacaagccgcccatctccaccggcttcacgaggctcatcgcggcacgaccgcgcacggaacgcacgcggccgacccgcgcgcctcgatgcgcgagcccatccgccgcgtcctccctttgcctttgccgctatcctctcggtcgtatcccgtttctctgtcttttgctccccggcgcgcgccagttcggagtaccagcgaaacccggacacctggtacacctccgccggccacaacgcgtgtccccctacgtggccgcgcagcacatgcccatgcgcgacacgtgcacctcctcatccaaactctcaagtctcaacggtcctataaatgcacggatagcctcaagctgctcgtcacaaggcaagaggcaagaggcaagagcatccgtattaaccagccttttgagacttgagagtgtgtgtgactcgatccagcgtagtttcagttcgtgtgttggtgagtgattccagccaagtttgcg

SEQ ID NO: 478 - protein, 100 aa, Artificial sequence
  consensu sbp domain on SPL11 polypeptides
  UNSURE (26)..(26): Xaa can be any naturally occurring amino acid
  UNSURE (30)..(30): Xaa can be any naturally occurring amino acid
  UNSURE (49)..(69): Xaa can be any naturally occurring amino acid or a gap
HCQVEGCNLDLSSAKDYHRKHRVCEXHSKXPKVIVAGLERRFCQQCSRXXXXXXXXXXXXXXXXXXXXXFHGLSEFDEKKRSCRRRLSDHNARRRKPQPE

SEQ ID NO: 479 - protein, 418 aa, Arabidopsis thaliana
MARDMAWEQLHSGPWHSVLPVWRDAYSMACLHVAKIHFAAGEFGEALGALDMGLIMGGMLLRKDLHDSVLLVSSEARKMTKSLEEASGDFKGERLVPEVPVDVNEVLKILPCRSLTCKRVEKRSGLSLEGFLRDYYLPGTPVVITNSMAHWPARTKWNHLDYLNAVASGATTASSGDHNNLRLPTPTLDAESQTLLQSISAEGGYAYARMAVLAVAGDQSAAEAGNRTVPVEVGKNYLCSDWKQELVTFSKFLERMRTNKSSPMEPTYLAQHPLFDQINELRDDICIPDYCFVGGGELQSLNAWFGPAGTVTPLHHDPHHNILAQVVGKKYIRLYPSFLQDELYPYSETMLCNSSQVDLDNIDETEFPKAMELEFMDCILEEGEMLYIPPKWWHYVRSLTMSLSVSFWWSNEAESSSS

SEQ ID NO: 480 - protein, 355 aa, Populus trichocarpa
MSTATTAAAAGNYLTTPTLDAESSNLLQTISSHGGYAYVSMSTLAASGDFRAAEAAREMAWEQLHSGPWHSVLPAWRDAYSMACLHVAKFHYRNGEFKESLRVLDLGLIMGGVLLKKDLESAIEIVTAKSREKESEGFEKGPKCKFVEEGDEFDKEEVLRVLPEKSLSSKIVVKKSGLSLEGFLREHFLSGSPVIISDCMAHWPARTKWNDMDYLKRVAGDRTVPVEVGKNYLCQEWKQELITFSEFLEKIQSNDSSSAVPTYLAQHQLFDQINELRKDICIPDYCCAGGGELRSLNAWFGPAGTVTPLHHDPHHNILAQVVGKKYVRLYTSSVSEELYPYNETMLCNSSQVTAF

SEQ ID NO: 481 - protein, 317 aa, Oryza sativa
AREMAWEQLHSGPWSEVGAAWRDAYALACLHVARLRRLGAAAADRRAALRALDMGLIMGGNLLRADLEAAIARIVADPGGGGDAEAVDEETRRWREGLERNRDVADYFFQALNILPAKSLSCKKVERRSCISLEEFICDYFLRESPVIISGSIDHWPARTKWKDIQYLKKIAGDRTVPVEVGKNYVCSEWKQELITFSQFLERMWSAGCPSNLTYLAQHPLFEQIKELHEDIMVPDYCYAGGGELQSLNAWFGPHGTVTPLHHDPHHNILAQVDLDNVDLKEFPRMYIVTSPVMTKHVVATIPNVTMTMYLLVTSDA

SEQ ID NO: 482 - protein, 551 aa, Ostreococcus tauri
MDDDHARASAGTTGDARCGTNGGRFGRGVIRARRRARRGHGSDALALAPTTTLSDVFRTNAIDAHVSARSLNACEDPPARYPPTCVDAERSATATRDFKAMSSREHQDAMATMMRSQPMVLKRTGVLGDVSSKYVADRFQGLEQTWDFERVASALGASEWECLMCPSSKHKFLVCDASKNAHGSYYHIREPEVETMRCKFEDFVQCARNWREKSILFDAEIFTAKTIVNAEDIADPPPKSDFDQRCPDDFIKNVCSGIDWGWFNRFTRAQRFGQLLSMRLVAGQRDSLNPARYYLEESIHLQVNGRRRILLIPPKHSFGGMYPYPVAHPYDGYSMVDLDDVVYGQTPAFTSVRGLSFVLEPGDFLYIPRGWWRHEQGLSKEHIHLDFRLLHGKRPRARDMAILPVSRSIEERLAVAEGIHQIKHWLKVIAEAEDANWIDLSTVKGHKRIKMTQMVRDEVDLNLGRGSWQAFLRTMIDGRLDPTPWLNISFREPLYLTDKPVHVADTRNELEKEFPEFYVAKLKKEGYAVDYTPVSVFNPTHPETIASVPKA

SEQ ID NO: 483 - protein, 578 aa, Caenorhabditis elegans
MEYKRLKIDECRDGVFNIRRKVFIEEQNCPESMEWDENEEQSSIYFVAFKGDLAVGCVRLRNIEKDLLKLERVAVLKEFRRRRIASDLIREALIYAQSESPNSPVYAYAQVSALQAYVNLGFTVLSKVWIEDGTFIPHQTIFWGTPISIDTFLKNQSEKADPSYEDYDARSPAMLPKIEAFKQRLEDLDTWNFGILQIHLDDQVVSKLIRNLFSRFSTNVDHFLNGNTEFSKEIVDQSEFLLKLADTKLNTGHFNEVDENWRKLYSLICFCQSFMMFKQNKYEIAIKIADKGLCMGRIDEDLVPIRQLAWLIHENLPGVSSDDWIHSSFQFNTTNTYPALIPLSNSKSIDECDEDDENSFEKLISAVQNNTPLIVRRHSSNMPAIEKWSFPFLLQELHSRTFPVEIGTKYSDENWSQKLMTFKEFIRNSENERLYLAQHRLFDQVPHLKRDVIIPDVCFGESSNPENVDMNMWIGPQDTVSPLHTDPRKNMFVQVHGTKLFRMVAPESSESVYPFDGILSNTSQVDVENPDLKIFPNFEQVEVLDAVINPGDAIFIPEKWWHFVRSTSPSISISFWFD

SEQ ID NO: 484 - protein, 349 aa, Homo sapiens
MAATAAEAVTSGSGEPREEAGALGPAWHESQLRSYSFPTRPIPRLSQSDPRAEELIENEEPVVLTDTNLVYPALKWDLEYLQENIGNGDFSVYSASTHKFLYYDEKKMANFQNFKPRSNREEMKFHEFVEKLQDIQQRGGEERLYLQQTLNDTVGGKIVMDFLGFNWNWINKQQGKRGWGQLTSNLLLIGMEGNVTPAHYDEQQNFFAQIKGYKRCILFPPDQFECLYPYPVHHPCDRQSQVDFDNPDYERFPNFQNVVGYETVVGPGDVLYIPMYWWHHIESLLNGGITITVNFWYKGAPTPKRIEYPLKAHQKVAIMRNIEKMLGEALGNPQEVGPLLNTMIKGRYN

SEQ ID NO: 485 - protein, 457 aa, Artificial Sequence
  Consensus sequence
  misc_feature (2)..(2): Xaa can be any naturally occurring amino acid
  misc_feature (4)..(9): Xaa can be any naturally occurring amino acid
  misc_feature (11)..(12): Xaa can be any naturally occurring amino acid
  misc_feature (14)..(15): Xaa can be any naturally occurring amino acid
  misc_feature (20)..(24): Xaa can be any naturally occurring amino acid
  misc_feature (27)..(27): Xaa can be any naturally occurring amino acid
  misc_feature (38)..(40): Xaa can be any naturally occurring amino acid
  misc_feature (42)..(43): Xaa can be any naturally occurring amino acid
  misc_feature (45)..(45): Xaa can be any naturally occurring amino acid
  misc_feature (49)..(50): Xaa can be any naturally occurring amino acid
  misc_feature (69)..(70): Xaa can be any naturally occurring amino acid
  misc_feature (72)..(74): Xaa can be any naturally occurring amino acid
  misc_feature (90)..(90): Xaa can be any naturally occurring amino acid
  misc_feature (92)..(95): Xaa can be any naturally occurring amino acid
  misc_feature (100)..(101): Xaa can be any naturally occurring amino acid
  misc_feature (104)..(104): Xaa can be any naturally occurring amino acid
  misc_feature (122)..(123): Xaa can be any naturally occurring amino acid
  misc_feature (126)..(127): Xaa can be any naturally occurring amino acid
  misc_feature (129)..(129): Xaa can be any naturally occurring amino acid
  misc_feature (133)..(137): Xaa can be any naturally occurring amino acid
  misc_feature (139)..(139): Xaa can be any naturally occurring amino acid
  misc_feature (142)..(142): Xaa can be any naturally occurring amino acid
  misc_feature (144)..(144): Xaa can be any naturally occurring amino acid
  misc_feature (146)..(149): Xaa can be any naturally occurring amino acid
  misc_feature (151)..(154): Xaa can be any naturally occurring amino acid
  misc_feature (156)..(156): Xaa can be any naturally occurring amino acid
  misc_feature (158)..(160): Xaa can be any naturally occurring amino acid
  misc_feature (162)..(173): Xaa can be any naturally occurring amino acid
  misc_feature (179)..(179): Xaa can be any naturally occurring amino acid
  misc_feature (186)..(186): Xaa can be any naturally occurring amino acid
  misc_feature (192)..(192): Xaa can be any naturally occurring amino acid
  misc_feature (200)..(200): Xaa can be any naturally occurring amino acid
  misc_feature (205)..(205): Xaa can be any naturally occurring amino acid
  misc_feature (213)..(214): Xaa can be any naturally occurring amino acid
  misc_feature (225)..(226): Xaa can be any naturally occurring amino acid
  misc_feature (232)..(232): Xaa can be any naturally occurring amino acid
  misc_feature (260)..(260): Xaa can be any naturally occurring amino acid
  misc_feature (266)..(266): Xaa can be any naturally occurring amino acid
  misc_feature (268)..(269): Xaa can be any naturally occurring amino acid
  misc_feature (271)..(273): Xaa can be any naturally occurring amino acid
  misc_feature (275)..(275): Xaa can be any naturally occurring amino acid
  misc_feature (277)..(277): Xaa can be any naturally occurring amino acid
  misc_feature (288)..(311): Xaa can be any naturally occurring amino acid
  misc_feature (314)..(314): Xaa can be any naturally occurring amino acid
  misc_feature (321)..(321): Xaa can be any naturally occurring amino acid
  misc_feature (328)..(328): Xaa can be any naturally occurring amino acid
  misc_feature (332)..(333): Xaa can be any naturally occurring amino acid
  misc_feature (375)..(375): Xaa can be any naturally occurring amino acid
  misc_feature (377)..(378): Xaa can be any naturally occurring amino acid
  misc_feature (392)..(392): Xaa can be any naturally occurring amino acid
  misc_feature (403)..(404): Xaa can be any naturally occurring amino acid
  misc_feature (409)..(411): Xaa can be any naturally occurring amino acid
  misc_feature (440)..(444): Xaa can be any naturally occurring amino acid
  misc_feature (452)..(456): Xaa can be any naturally occurring amino acid
AXGXXXXXXLXXPXXDAESXXXXXLLXSISAEGGYAYXXXAXXAXAGDXXAAEAARDMAWEQLHSGPWXXVXXXWRDAYSMACLHVAKIXFXXXXAGEFXXALXALDMGLIMGGMLLRKDLXXALXXVXAEAXXXXXSXEEXSXDXXXXRXXXXVXVXXXEXXXXXXXXXXXXLKILPXKSLSCKXVEKRSXLSLEGFLXDYFLXGTPVIISXXMAHWPARTKWXXLDYLKXVAGRTVPVEVGKNYLCSDWKQELITFSXFLERMXSXXSXXXPXEXTYLAQHPLFDXXXXXXXXXXXXXXXXXXXXXXXXQIXELRDDIXIPDYCFXGGGXXELQSLNAWFGPAGTVTPLHHDPHHNILAQVVGKKYIRLYPSXLXXEELYPYSETMLCNXSSQVDLDNIDXXEFPKXXXLEFMDCILEEGDMLYIPPKWWHYVRSLSXXXXXLSVSFWWXXXXXS

SEQ ID NO: 486 - RNA, 21 nt, Oryza sativa
auacgagugagagaagacagc

SEQ ID NO: 487 - RNA, 21 nt, Oryza sativa
acacgagagagagaagacagu

SEQ ID NO: 488 - RNA, 20 nt, Oryza sativa
cacgagugagagaagacagu

SEQ ID NO: 489 - RNA, 21 nt, Oryza sativa
caugcucccucucuucuguca

SEQ ID NO: 490 - RNA, 21 nt, Oryza sativa
gaugcucccucucuucuguca

SEQ ID NO: 491 - RNA, 21 nt, Oryza sativa
ugugcucucucucuucuguca

SEQ ID NO: 492 - RNA, 21 nt, Oryza sativa
cgugcucucucucuucuguca

SEQ ID NO: 493 - RNA, 21 nt, Oryza sativa
ggugcucucucucuucuguca

SEQ ID NO: 494 - protein, 8 aa, Artificial Sequence
  Consensus sequence
  misc_feature (2)..(2): Xaa is Gly or Cys
AXALSLLS

1. A method for enhancing a yield-related trait in a plant relative to a control plant, comprising:
a) modulating expression in a plant of a nucleic acid encoding a bHLH11-like polypeptide, wherein said bHLH11-like polypeptide comprises a Helix-Loop-Helix domain;
b) modulating expression in a plant of a nucleic acid encoding an LBD polypeptide, wherein said LBD polypeptide comprises a DUF206 domain;
c) modulating expression in a plant of a nucleic acid encoding a JMJC polypeptide, wherein said JMJC polypeptide comprises a JmjC domain;
d) modulating expression in a plant of a nucleic acid encoding a Casein kinase I (CKI) polypeptide, wherein said CKI polypeptide comprises the amino acid sequence of SEQ ID NO: 174 or is an orthologue or paralogue thereof;
e) increasing expression in a plant of a nucleic acid sequence encoding a plant homeodomain finger-homeodomain (PHDf-HD) polypeptide, wherein said PHDf-HD polypeptide comprises:
i) a domain having at least 25% sequence identity to the leucine zipper/plant homeodomain finger (ZIP/PHDf) domain of SEQ ID NO: 233; and
ii) a domain having at least 25% sequence identity to the homeodomain (HD) of SEQ ID NO: 234
f) modulating expression in a plant of a nucleic acid encoding an ASR polypeptide, wherein said ASR polypeptide comprises the amino acid sequence of SEQ ID NO: 397, or is an orthologue or paralogue thereof; or
g) modulating expression in a plant of a nucleic acid encoding a SPL11 polypeptide, wherein said SPL11 polypeptide comprises a SBP domain having at least 70% sequence identity to any one of SEQ ID NO: 456 to SEQ ID NO: 468 and SEQ ID NO: 478,
and optionally selecting for a plant having an enhanced yield-related trait relative to a control plant.

2. The method of claim 1, wherein:
a) said bHLH11-like polypeptide comprises one or more of the following motifs:
i) Motif 1 (SEQ ID NO: 246);
ii) Motif 2 (SEQ ID NO: 247);
iii) Motif 3 (SEQ ID NO: 248);
iv) Motif 4 (SEQ ID NO: 249);
v) Motif 5 (SEQ ID NO: 250);
vi) Motif 6 (SEQ ID NO: 251);
vii) Motif 7 (SEQ ID NO: 252);
b) said LBD polypeptide comprises one or more of the following motifs:
i) Motif 1: MSCNGCRXLRKGCX (SEQ ID NO: 5);
ii) Motif 2: QXXATXFXAKFXGR (SEQ ID NO: 6);
iii) Motif 3: FXSLLXEAXG (SEQ ID NO: 7);
c) said JmjC domain comprises a sequence having at least 50% sequence identity to:
i) SEQ ID NO: 78; and/or
ii) one of the JmjC domains comprised in the JMJC polypeptide of SEQ ID NO: 84, 86, 96, 98, 104, 108, 110, 112, 114, 116, 118, 120, 122, 124, 128, 130, 132, or 134, whose amino acid coordinates are given in Table B4;
d) said JMJC polypeptide comprises a motif having at least 50% sequence identity to any of:
i) SEQ ID NO: 79,
ii) SEQ ID NO: 80,
iii) SEQ ID NO: 81,
iv) SEQ ID NO: 82;
e) said PHDf-HD polypeptide comprises (i) a PHD domain as represented by PFAM00628 and (ii) an HD as represented by PFAM00046;
f) said SPL11 polypeptide comprises any one or more of the following conserved motifs:
i) Motif 1 of SEQ ID NO: 469, wherein any conservative amino acid substitution and/or 1 or 2 non conservative substitution are allowed;
ii) Motif 2 of SEQ ID NO: 470, wherein any change is allowed, provided that at least 4 amino acids have a polar side chain, preferably serine or threonine, and provided that the domain is located at the N-terminal end of the SBP domain;
iii) Motif 3 of SEQ ID NO: 471, wherein 1 or 2 mismatches are allowed;
iv) Motif 4 of SEQ ID NO: 472, wherein 1, 2 or 3 mismatches are allowed.

3. The method of claim 1, wherein said modulated expression is effected by introducing and expressing in said plant a nucleic acid encoding said bHLH11-like polypeptide, said LBD polypeptide, said JMJC polypeptide, said CKI polypeptide, said PHDf-HD polypeptide, said ASR polypeptide, or said SPL11 polypeptide.

4. The method of claim 1, wherein:
a) said nucleic acid encoding a bHLH11-like polypeptide encodes any one of the proteins listed in Table E1 or is a portion of such a nucleic acid, or a nucleic acid capable of hybridizing with such a nucleic acid;
b) said nucleic acid encoding a LBD polypeptide encodes any one of the proteins listed in Table A1 or is a portion of such a nucleic acid, or a nucleic acid capable of hybridizing with such a nucleic acid;
c) said nucleic acid encoding a JMJC polypeptide encodes any one of the proteins listed in Table B1 or is a portion of such a nucleic acid, or a nucleic acid capable of hybridizing with such a nucleic acid;
d) said nucleic acid encoding a CKI polypeptide is a portion of SEQ ID NO: 173, or a nucleic acid capable of hybridizing with such a nucleic acid;
e) said nucleic acid encoding a PHDf-HD polypeptide is any of the nucleic acid sequences given in Table D1 or a portion thereof, or a nucleic acid capable of hybridizing with such a nucleic acid;
f) said nucleic acid encoding an ASR polypeptide is a portion of SEQ ID NO: 396, or a nucleic acid capable of hybridizing with such a nucleic acid;
g) said nucleic acid encoding a SPL11 polypeptide encodes any one of the proteins listed in Table G1 or is a portion of such a nucleic acid, or a nucleic acid capable of hybridizing with such a nucleic acid.

5. The method of claim 1, wherein said nucleic acid sequence encodes an orthologue or paralogue of any of the proteins given in Table E1, A1, B1, D1, or G1.

6. The method of claim 1, wherein:
a) said nucleic acid encodes a bHLH11-like polypeptide, and wherein said enhanced yield-related trait comprises increased yield, preferably increased seed yield, relative to a control plant;
b) said nucleic acid encodes a LBD polypeptide, and wherein said enhanced yield-related trait comprises increased yield, preferably increased biomass and/or increased seed yield, relative to a control plant;
c) said nucleic acid encodes a JMJC polypeptide, and wherein said enhanced yield-related trait comprises increased yield, preferably increased harvest index and/or increased seed yield, relative to a control plant;
d) said nucleic acid encodes a JMJC polypeptide, and wherein said enhanced yield-related trait comprises plant early vigour relative to a control plant;
e) said nucleic acid encodes a CKI polypeptide, and wherein said enhanced yield-related trait comprises increased early vigour and/or increased yield relative to a control plant;
f) said nucleic acid encodes a CKI polypeptide, and wherein said enhanced yield-related trait comprises increased biomass and/or increased seed yield relative to a control plant;
g) said nucleic acid encodes a PHDf-HD polypeptide, and wherein said yield-related trait is a seed yield-related trait comprising one or more of (i) increased number of primary panicle; (ii) increased total seed weight per plant; (iii) increased number of (filled) seeds; (iv) increased TKW; or (v) increased harvest index relative to a control plant;
h) said nucleic acid encodes an ASR polypeptide, and wherein said enhanced yield-related trait comprises increased yield, preferably increased seed yield, relative to a control plant;
i) said nucleic acid encodes a SPL11 polypeptide, and wherein said enhanced yield-related trait comprises increased yield relative to a control plant;
j) said nucleic acid encodes a SPL11 polypeptide, and wherein said enhanced yield-related trait comprises increased total seed weight, increased number of filled seeds, increased number of seeds or florets per panicle, increased thousand-kernel weight, increased seed filling rate, and/or increased harvest index relative to a control plant; or
k) said nucleic acid encodes a SPL11 polypeptide, and wherein said enhanced yield-related trait comprises increased plant (seedling) early vigour relative to a control plant.

7. The method of claim 1, wherein:
a) said nucleic acid encodes a bHLH11-like polypeptide, and wherein said enhanced yield-related trait is obtained under non-stress conditions;
b) said nucleic acid encodes a LBD polypeptide, and wherein said enhanced yield-related trait is obtained under non-stress conditions;
c) said nucleic acid encodes a LBD polypeptide, and wherein said enhanced yield-related trait is obtained under conditions of nitrogen deficiency;
d) said nucleic acid encodes a JMJC polypeptide, and wherein said enhanced yield-related trait is obtained under non-stress conditions;
e) said nucleic acid encodes a JMJC polypeptide, and wherein said enhanced yield-related trait is obtained under mild drought stress growth conditions;
f) said nucleic acid encodes a JMJC polypeptide, and wherein said enhanced yield-related trait is obtained under growth conditions of nitrogen deficiency;
g) said nucleic acid encodes a CKI polypeptide, and wherein said enhanced yield-related trait is obtained under non-stress conditions;
h) said nucleic acid encodes a CKI polypeptide, and wherein said enhanced yield-related trait is obtained under abiotic stress conditions;
i) said nucleic acid encodes a CKI polypeptide, and wherein said enhanced yield-related trait is obtained under abiotic stress conditions selected from one or more of: conditions of drought stress, conditions of salt stress, and conditions of nitrogen deficiency;
j) said nucleic acid encodes an ASR polypeptide, and wherein said enhanced yield-related trait is obtained under non-stress conditions;
k) said nucleic acid encodes a SPL11 polypeptide, and wherein said enhanced yield-related trait is obtained under non-stress conditions;
l) said nucleic acid encodes a SPL11 polypeptide, and wherein said enhanced yield-related trait is obtained under mild drought stress growth conditions;
m) said nucleic acid encodes a SPL11 polypeptide, and wherein said enhanced yield-related trait is obtained under growth conditions of nitrogen deficiency.

8. The method of claim 1, wherein:
a) said nucleic acid encodes a bHLH11-like polypeptide, and wherein said nucleic acid is operably linked to a constitutive promoter, a GOS2 promoter, or a GOS2 promoter from rice;
b) said nucleic acid encodes a LBD polypeptide, and wherein said nucleic acid is operably linked to a constitutive promoter, a GOS2 promoter, or a GOS2 promoter from rice;
c) said nucleic acid encodes a JMJC polypeptide, and wherein said nucleic acid is operably linked to a constitutive promoter, a GOS2 promoter, or a GOS2 promoter from rice;
d) said nucleic acid encodes a CKI polypeptide, and wherein said nucleic acid is operably linked to a seed-specific promoter;
e) said nucleic acid encodes a CKI polypeptide, and wherein said nucleic acid is operably linked to a WSI18 promoter or a WSI18 promoter from rice;
f) said nucleic acid encodes a PHDf-HD polypeptide, and wherein said nucleic acid is operably linked to a constitutive promoter, a plant constitutive promoter, a GOS2 promoter, or a GOS2 promoter from rice;
g) said nucleic acid encodes an ASR polypeptide, and wherein said nucleic acid is operably linked to a constitutive promoter, a GOS2 promoter, or a GOS2 promoter from rice;
h) said nucleic acid encodes a SPL11 polypeptide, and wherein said nucleic acid is operably linked to a constitutive promoter, a GOS2 promoter, or a GOS2 promoter from rice; or
i) said nucleic acid encodes a SPL11 polypeptide, and wherein said nucleic acid is operably linked to a seed specific promoter, a WSI18 promoter, or a WSI18 promoter from rice.

9. The method of claim 1, wherein:
a) said nucleic acid encoding a bHLH11-like polypeptide is of plant origin, from a monocotyledonous plant, from a plant of the family Poaceae, from a plant of the genus Triticum, or from a Triticum aestivum plant;
b) said nucleic acid encoding a LBD polypeptide is of plant origin, from a dicotyledonous plant, from a plant of the family Brassicaceae, from a plant of the genus Arabidopsis, or from an Arabidopsis thaliana plant;
c) said nucleic acid encoding a JMJC polypeptide is of plant origin, from a dicotyledonous plant, from a plant of the family Brassicaceae, from a plant of the genus Arabidopsis, or from an Arabidopsis thaliana plant;
d) said nucleic acid encoding a CKI polypeptide is of plant origin, from a dicotyledonous plant, from a plant of the family Solanaceae, from a Nicotiana tabacum plant;
e) said nucleic acid encoding a PHDf-HD polypeptide is of plant origin, from a monocotyledonous plant, from a plant of the family Poacae, from a plant of the genus Oryza, or from an Oryza sativa plant;
f) said nucleic acid encoding an ASR polypeptide is of plant origin, from a dicotyledonous plant, from a plant of the family Poaceae, from a plant of the genus Oryza, or from an Oryza sativa plant; or
g) said nucleic acid encoding a SPL11 polypeptide is of plant origin, from a dicotyledonous plant, from a plant of the family Brassicaceae, from a plant of the genus Arabidopsis, or from an Arabidopsis thaliana plant.

10. The method of claim 1, wherein said nucleic acid is selected from the group consisting of:
a) a nucleic acid comprising the nucleotide sequence of SEQ ID NO: 244;
b) a nucleic acid encoding a bHLH11-like polypeptide comprising the amino acid sequence of SEQ ID NO: 245; and
c) a nucleic acid encoding a polypeptide having at least 80% sequence identity to the amino acid sequence of SEQ ID NO: 245.

11. A plant obtained by the method of claim 1, or a plant part, plant cell, seed, or progeny of said plant, wherein said plant, plant part, plant cell, seed, or progeny comprises:
a) a recombinant nucleic acid encoding said bHLH11-like polypeptide;
b) a recombinant nucleic acid encoding said LBD polypeptide;
c) a recombinant nucleic acid encoding said JMJC polypeptide;
d) a recombinant nucleic acid encoding said CKI polypeptide;
e) a recombinant nucleic acid encoding said PHDf-HD polypeptide operably linked to a plant constitutive promoter;
f) a recombinant nucleic acid encoding said ASR polypeptide; or
g) a recombinant nucleic acid encoding said SPL11 polypeptide

12. A construct comprising:
a) a nucleic acid encoding a bHLH11-like polypeptide, an LBD polypeptide, a JMJC polypeptide, a CKI polypeptide, a PHDf-HD polypeptide, an ASR polypeptide, or a SPL11 polypeptide as defined in claim 1;
b) one or more heterologous control sequences capable of driving expression of the nucleic acid of a); and optionally
c) a transcription termination sequence.

13. The construct of claim 12, wherein:
a) said nucleic acid encodes a bHLH11-like polypeptide, and wherein one of said control sequences is a constitutive promoter, a GOS2 promoter, or a GOS2 promoter from rice;
b) said nucleic acid encodes an LBD polypeptide, and wherein one of said control sequences is a constitutive promoter, a GOS2 promoter, or a GOS2 promoter from rice;
c) said nucleic acid encodes an JMJC polypeptide, and wherein one of said control sequences is a constitutive promoter, a GOS2 promoter, or a GOS2 promoter from rice;
d) said nucleic acid encodes a CKI polypeptide, and wherein one of said control sequences is a seed specific promoter or a WSI18 promoter;
e) said nucleic acid encodes a CKI polypeptide, and wherein one of said control sequences is a WSI18 promoter or a WSI18 promoter from rice;
f) said nucleic acid encodes a PHDf-HD polypeptide, and wherein one of the control sequences is a plant constitutive promoter or a GOS2 promoter;
g) said nucleic acid encodes an ASR polypeptide, and wherein one of said control sequences is a constitutive promoter, a GOS2 promoter, or a GOS2 promoter from rice;
h) said nucleic acid encodes a SPL11 polypeptide, and wherein one of said control sequences is a constitutive promoter, a GOS2 promoter, or a GOS2 promoter from rice; or
i) said nucleic acid encodes a SPL11 polypeptide, and wherein one of said control sequences is a seed specific promoter, a WSI18 promoter, or a WSI18 promoter from rice.

14. A method for making a plant having increased yield relative to a control plant, comprising transforming the construct of claim 12 into a plant, plant part or plant cell.

15. A plant, plant part or plant cell comprising the construct of claim 12.

16. A method for the production of a transgenic plant having increased yield relative to a control plant, comprising:
a) introducing and expressing in a plant a nucleic acid encoding a bHLH11-like polypeptide, an LBD polypeptide, a JMJC polypeptide, a CKI polypeptide, a PHDf-HD polypeptide, an ASR polypeptide, or a SPL11 polypeptide as defined in claim 1; and
b) cultivating the plant under conditions promoting plant growth and development.

17. A transgenic plant having increased yield relative to a control plant, resulting from modulated expression of a nucleic acid encoding a bHLH11-like polypeptide, an LBD polypeptide, a JMJC polypeptide, a CKI polypeptide, a PHDf-HD polypeptide, an ASR polypeptide, or a SPL11 polypeptide as defined in claim 1, or a transgenic plant cell derived from said transgenic plant.

18. The transgenic plant of claim 17, or a transgenic plant cell derived thereof, wherein said plant is a crop plant, a monocot, or a cereal, or wherein said plant is rice, maize, wheat, barley, millet, rye, triticale, sorghum, or oats.

19. Harvestable parts of the transgenic plant of claim 17, wherein:
a) said harvestable parts comprise a recombinant nucleic acid encoding said bHLH11-like polypeptide, and wherein said harvestable parts are preferably seeds;
b) said harvestable parts comprise a recombinant nucleic acid encoding said LBD polypeptide, and wherein said harvestable parts preferably shoot biomass and/or seeds;
c) said harvestable parts comprise a recombinant nucleic acid encoding said JMJC polypeptide, and wherein said harvestable parts are preferably shoot biomass and/or seeds;
d) said harvestable parts comprise a recombinant nucleic acid encoding said CKI polypeptide, and wherein said harvestable parts are preferably shoot biomass and/or seeds;
e) said harvestable parts comprise a recombinant nucleic acid encoding said PHDf-HD polypeptide, and wherein said harvestable parts are preferably seeds;
f) said harvestable parts comprise a recombinant nucleic acid encoding said ASR polypeptide, and wherein said harvestable parts are preferably seeds; or
g) said harvestable parts comprise a recombinant nucleic acid encoding said SPL11 polypeptide, and wherein said harvestable parts are preferably shoot biomass, flowers and/or seeds.

20. Products derived from the transgenic plant of claim 17 and/or from harvestable parts of said plant, wherein said products comprise a recombinant nucleic acid encoding said bHLH11-like polypeptide, said LBD polypeptide, said JMJC polypeptide, said CKI polypeptide, said PHDf-HD polypeptide, said ASR polypeptide, or said SPL11 polypeptide.
